United States Patent Application Publication US 2025/0188405 A1 - sequence listing, part 4

SEQ ID NO: 2 - DNA, 2912557 bp, Cupriavidus necator (residues 1,456,280-2,912,557 of 2,912,557)
  source 1..2912557: mol_type = genomic DNA
ccggactggagcgagcgcaagccgcacctgggcggcgcgcttggcgcggcgctgttgggcagcctgctgtcgcgcggctgggtcgagcctacgcgcacctcgcgcgcgttgcgcgtgacaccggcgggccaacgcgagatcattcgcatcgcggcctaggagaccgcagcaagcaacaggagaaaacaagatggccacacccctggacgacgacacgcaggacgcgattgcgcgtttcttcgccctgatcaaccttggcgacagcgcgcagacctcggcgcagctgtcgatgtttgaagatgccctgctcgatgccgaggacgatgacaccgatggccaggaactgctgtgggtgatccgtgaggtcatcgactggcagtccgggttctttgtcgactggaaggatgcccagtcctttatcggctgcctgaaccagttgtgcgaacggatcgacctggagatcgactggggcagcgacgaccccgaggaagaagccttcctggagaccaccagcgtgccggaactgatggagctggcgcacaaccaattgcgcgtggccggctatacgctgtggaactgggataccggcggcgacgcctacggcggctggatcacgcgcagcgaggacgacgaggagatgctggatcttgccgaagtgctgcactttgacgtgcggccggccgagcagccttattgaccgatgcccgcaagcggaggccgcggcagctaagcgttctccctccgcttgccgtacgggcgccgcgcctccggcacccccagcgtctgctccagcatgtccagcagcacccgcacgctggccggcatcagcttgcgcgccggcatcagcacgtagaccttcagcggcgatgaggcatagcccggcagcacccgcaccagttgcccctgaccgaccgcatcctgcacgaagcgcggcgacagccgcgtcacgcccagcccgtcgagcgccgccttgagccgcagctcggcgttatgggtgcagatgcgcggctcgacatcctggcgtgcaatctccacgccgtcgcgcaggaactcccagtggcggtcgtcggcattgcccagcgtgggccacccctgcaggtcctgcggcgtgcgcggcagcccgcgcgtcttgatcagtgccggcgcggcatagaaggcgcgctcaaccagcaccacgcgcttgctggcgaacgaggtgtcgtgcagcgcggtgtcggtcatcacgaacgcgaggtcgtagccgtggcggatcaggtcgggctggtcccagctgacatcgacctgcacgcgcaggccggggtgggcgcgcagcacgcgcgtcaggctttcggacagatgctgggagccgacttcatagggggtggagatgcgcagcaggccgctgacttcggcgctgtccgaggtggcctcggcactgatttcatggagttcggcgaacagcggcgccacgcgctcatacaggcgctggccgcgttcggtcacgcgcacgcggcgcgtggtgcgctcgaacaggcggatgcctagctggccttccagccgtgccaccgcggcgctggcggaagatttgggtacctctgccagctcggccccctgggtgaagccgccgccttccaccacgcggcaaaaaatctcccagtccttccattcgattgtcttcatgcggcgcctcgtcattgcggtgcgccgcgattgtcccacagcgcgaaccatggcgctgtgggcggcggcccttaatcgaacaggatcaccgagcgcgccagctcgccgcggcgcagttggtcgaaggcatcgttgatgcgctccagcggcaggcgctgcgcgatcagttcgtccaggtgcaggcggccggccatatagaagtccaccatgcgcggcatgtccaccgggaagcggttggagcccatcagcgagccctggatgcgcttctcgcccaggaaatcgctgcccttcagttcaatcttgacgcccggcgcgatcatgccgatgaccgtggcggtgccgccccggcgcagcatggcaaaggcctgctcggtggtctgcttcaggccgatggcctcgaaggcatggtgcacgccgccgccggtgagggtgcgcacggcatccagcacatcggcattgccggcgtcgatcacgtcggtcgcgccgaacctgcgcgccagctccagcttggccggcacgcggtcgatggcgatgatgcgcccggcaccggcgatggcggcgctgttgaccgtggccagcccgatgccgccgcagccgatcacggcaacggtctcgcccggctgcaccttcgcggtatggatcaccgcgcccatgccggtggtgaccgcgcagccgatcagcgcggcgcggtccagcggcatgtcgcgccgtattgccaccagcgcgtgctcatggatcagcatctgctcggcgaacgccgacaggttcaggaactggttcatgggcccgccctggcgggccatcaggcgcggctcttcgccttcgcggcggcgggtatcgggctcaatgcacagcgacaggcggccggtcaggcagtgttcgcaatggccgcagtaggccgacaggcaggtgatcacgtggtcaccgggcttgaccgtgcgcacttcggcgccgacctgctcgaccacacccgcggcctcgtggcccaggattgccggcatcgggtacgggtaggcaccgtccaggaaatgcaggtccgagtggcacacgcccacggcggcggtgcgcaccagcacctcgcgcgggccgggcttgccgatggcaacgtcttcgataatcagcggggtcttgggttgatacaggacagcggccttcatgaagctcctttgcggcaggcaacgaagcggaaaaccatacgcccaaacccgggttcaggaaaggcgcggtgcagcaccgcagccaggcttatagctcttccttgatcgggagcacgcgcagcacgccgatgcccagatgctgcagcggacccatgccgggttcgctgtcatagaccatgagctgccccttctcgcgcgtggtccaggtcaggcgccggttgccgccgtcgccatcggtctgcatgccgacgcgataggccatgtcgagcagcccgtgctcggtggacttgatcatgcgctcggccagcgccgggctgtccagcacgacgcccatctcggtattgagcttggccgagcgcgggtccatgttgagcgagccgatgaataccaggtgccggtcgacgatgtagttcttggcatgcaggctggcgcggctggacgacagccatgagcgcgagcgcgaaccgcgcgcggccttgccgctgcttgccagttcggcgtaggcgctgggcttgagctcgtacagctcgacgcccgcggccaccagcgccagccggtgcggggcgtagccggcatgcaccgggctgacatcggtggcggcaaacgagttggtcaggatgcgcacgcggatgccgcgctttgccagggcgatcagccaggcctcgccatcgtcgtccggcacgaagtacggcgagatcagcagcacttccttctgcgcgccgttgatcattttctcgagccgggcggtggcgtgcccggggtcgtcgtcggtctggtgcgtaatcttggcggccttgtcggagaccacgacagccttgccgctgtaggcaggcatgcggccgctctcgatgcccttggccaggccggactccagcaattccttcacgtaggggctggcgacggcctggtcgccgcgtgcttccaggcccttgcgcaggctgcgcatctcaaccggcgcttccttgcctgcggggatcagcgccaccaccgggtatgaggactggtcgttccagtattcgtcgaacaccgccgatacctgcggcaccgccggtccggcaatcagcacatcgaggtcgctgaagtccatgtcggcgcgcgcggagaagtaggcatcgccgacattgcgcccgcccagcagggtcatctggttgtccaccgtcatcgacttgttgtgcatgcgccggtccagccgcttgaagccggccagcatttccagccagcgcacgctgcggttggcaaacggattgaacagtcgcacctcgatattgggatgcgaatcgatggccgacaggatcttgtccatgccaccggtatgcaggtcgtcgagcagcatgcgcacgcgcacgccgcggtcggccgcgtcgatgatgtcgcccagcacggcggcgccggtgccggtggtctcgaagatataggtctgcaggtccaggctgcgttgcgccgcacgcgccatcgccagccgcgcagcgagcgcgtcgggcccggactgcagcggatagaacagcgactcgcctgggtgctgcgccaggcgcggcgccagcaccttgcccagcggggtgtcggcggtactgaccggggcgctcgagggggtgcgctgcgccgaggctggcaggctggcgcaccctgccagcaacccggccgccagcgccgacccgagcatcgccgccgtcagccggcgcaggccccggctggcgcccgcgtgcctcgcggcacggcttggccgggtatcgaacggaacatgacagagcgtctggaacatccgtgaggtctccctgcggcgggatgggatggggctggccccgcgcgccggccggcatgcagcgcctgctacctcgcacgatataccgcgcgccgctgccgtggcagcggtgccattcctgttccgcgtcgggtgtttgtcctacatcgcatgcacaggcaatgcggtcacgcggccaatgcggcacaccgggcggcgcgcggctcgcgcagcggctttccctgcacaacgatttctcttatgatgccgcccaatataccggccggtagaaccgggaggaggcactggcggcgggccgccgcgacccgtgcggctggcgcttcggcgcagcttgccgcctctcggcgatgccggcatagttgcgcgccttcgcgaccttttgtcctggcgcgcgcccagaccggatcctgatgtcaagccaaccttcccagcccacctcttccggcgcccccgcgccgacgctgcgccgcaccctgcgggcacgccatctcaccatgatcgccatcggcggctcgatcggcacggggctgttcgtggcctcgggtgccaccatcgcacaggccggccccggcggcgcgctggccgcctatatcctgatcggggcgatggtctatttcctgatgaccagcctgggcgagctggcggcctatatgccggtgtcgggctcgttcgccacctatggcgcgcgctatgtcgatgaaggcttcggcttcgcgctcggctggaactattggtacaactgggcggtgaccatcgcggtggaactggccgcggcccagctggtgatgcagtactggttccccgacacgccgggcgtgctgtggagcgcgctgttcctgggcctgatgttcctgctcaacgcgatctcggtgcgcggcttcggcgaggccgagtactggtgcgcgctggtcaaggtggtgacggtgatcgcctttatcggcatcggcacgctgatgatcttcggcatcctgcgcggcgacgtgtcggcctcccacggactggccaacctgaccaccggcgacgcgcccttcgtcggcggcctgccggcgctgatcggcgtggccatgatcgccggcttctcgttccagggcaccgagctgatcggcgtcgccgccggcgaatcggccgatccggccaagaacatcccgcgcgcggtgcgccaggtgttctggcgcatcctgctgttctatgtgctggcgatcctgatcatcggcatcctgatcccctacaccgacccgaacctgctcaagaacgacgtgcagaccgtgggcgtcagcccgttcacgctggtgttccgccatgcgggcctggcctttgcggcaggcgtgatgaacgcggtgatcctgaccgcggtgctgtcggccggcaattctggcatgtatgcctccacccgcatgctgtacaacctggccaccgaaggccgcgcgccgcgcatctttgcgcagctcacgcgcaacggcgtgccgctgatggcgctgctggccactaccgcggtgggcgcgctgtgctttctcacctcgttgttcgaaagcaggtcggtctacctgtggctgctgaacctgtccggcatgaccggatttatcgcgtggctgggcattgcggtcagccattaccgcttccgcaagggctttgtcgcgcaagggctggacctggaccggctgccttaccgctcgccgttcttcccctacgggccgatcttcgcctttgcgctgtgcctgatcgtgacgcttgggcagaactaccaggctttcaccagcggcaagatcgactgggtcagcgtggccgccacctatatcggcatcccgatcttcctcctgatctggctgggctatcgcattgcgcgcaagacgcgcttcgtgtcctatgccgagatgcaattccccgccctgccggccagacgcgatgccgccccggcgcgcgccgccgtgccggcaatcggtgaataagcgccattcccgcgcgcttcacaaccagcagtacacaagagcaagaaagcacaagcacaacaacaacaaggagcatcgctttgaagagagcaatccgcatgagcatgctggcgcttggcgccggcatggcactgagcctgtccgcgcacgccgcgccgacgctggtggaatcggtgcagggctacaccctgaagcaggacaagatcaccagcttcaccggcctggtgttcgaccagggcaaggtgctggccaccggcgacgccgccgcactgcgcgcgcagtaccccgatgccaaacgcatcgacggccagggcaagaccctgctgccgggcctgatcgacgcccacggccacgtgttccgcctgggcttcaagaccaccgagatctcgctgtccggcaccaggacgctggccgaggcgcaaggcatgatccgcgcctatggcgacaagaacccgcagcgcaagtggctgctgggctatggctggaaccaggtgaactggaagctgggccgcttcccgaccgcggccgagctggacgcggcggtgtcggaccgcccggtgcggctggtgcgcgtggacggccacgccgcgtggctcaacaccaaggcgctgcaggccgccggcatcacgcgcgacaccaaggacccggccggcggacgcatcgagcgcgatgccaacggcaaccccaccggcgtgctggtcgacaaggccatggcgctggtcaacagcgtgatcccgccgtacagcgacgatgaccgccgcgccgcgctggccgcctcgctggcgcacatgaacgcgctcggcctgaccgcagcgggcgacgccggcgtgaccgttgccgaggacaagatttaccgcgagttcgccgaccagggcaagctgaccacgcgcatctacggcatgatccgcgacaccggcgacgacttcaaggcgctgtcggccaaggggccgctggtgggctatggcaacgaccgctactacctgcgcgcggtcaagctgtatggcgacggcgcactgggcagccgcggcgccgcgctgatggcaccgtactcggacgaccacgtgcacagcggcctgctcttcatgagcgatgccgccatgcagaccgcgatcaagaccgcgatcaaggccggctaccaggtcaacatccacgccatcggcgatgccaccaaccaccaggtgctggatgccatggaaacggcctacaaggacgtgggcgggcgccagttgcgtaaccgcgtcgagcacgcgcaggtgatcgcgctgtcggacatcccgcgcttcaagacgctggacctgatcgcctcgatgcagcccacgcacgccaccagcgacatgaacatggccgaagaccgtgtcggcaaggatcgcatcaagggcgcctatgcctggcagacgctgctcaagcaaggcaccgtgatcgcgggcggctcggacttcccggtggaatcggccaacccgttctacggcctgcacgccgcggtcacccgcactgaccatgaaggccgcccgatccgcggctggcatccggaagaggccatgaccctgccgcaggcattccgcgccttcaccctggacgcggcctatgccgagcaccaggagaagacgctgggctcgctcgaagccggcaagtgggccgacttcatcctggtcgaccaggacctgttcaaggccaagccggcagacatctggaagacccaggtgctggagacctgggtggcgggtgagcgggtgtacgcgaaggacggcaagcgttaagccgccatccacggcatgccgccattcgcggcggcttgctgtccttgaaaaaaagcgcgcggcactgatcgtgccgcgcgcttttcatttgctggcggtctggactgcgcgttacatggccagctcgctatgcgacccaagccggacaagttgcagtgtccaagggtctggcttccgatagatcagcaaaaggtctggccgaacatggcaatcccggaagtccttccactggccgccaagcgcatggtcgcgaaatttgtccggcagcgacatgtcactcgccaaggcagtcaggattgcaaaccagtcaccagccgggctttgcagcagcgccttgaacggccctttgagttcgcgcttgtaatcgcgcttgaattgggtcgtccgttcaatcgtcctcatcgttgagatccgccatcaggtcgctcaccgacccgaacttgcggaggccaccggcccgcgcctcttttagcgacgcaatggttgctggattgggagtcatcagttccacaggcaatgccttttcacgtgccacgcgcgtcaaaagcatgcgcacggcgtctgaaaccgtcagtcccatcgcttccagaacgatcgcggcctcttccttgatttcaacgtcgatacgggctcggacaaaggtcgaagcggacatgacaggctcctgcgaacaatagcgaagtggagaacggataagtggacatctcgaccagtttgagatttgtccacgccaattgtattcacattgtagctcatatgagctacgtcgcccagtttgatgccgccccgttgttttcaaccacaaggctcatttggcgtcttgacgccccatcccaacgctagcatcattcggtcttttcataaatgcgaattattcgcatttgtacctacatttacatacaggcttgcctgtctcctgccccggcgggtcccctcatgaatcgtcaagtcattcgcgccgcgcgcctgcgcgcacccatgccccgccatctcgccgtgctggcacaactggctgtcgtggtcggctttccggcaaccgccgcgctggcacagcaagccgcggcgccggcggatgcgcagtcgctgcccgcggtgaccgtcagcgcctcggcggtcgacgattccggcctgcagcttgagaaaaaggccagcaccggcgcgctgggctcgcgcacgcagctcgacaccccgtactccaccaccatcgtcaccggcgaagaccttgctgagcgccaggtggccaagctgggcgatgtgtttgcgatggatgcgtcggtcagcgacaacggcaacggctacaacagctggtccagctacctgagcgtgcgcggcctgcagatcgactggcagaacggcttcaagatcaacgggctgccgttcgtggcctacggcatcacgctgccctacgagcacatggagcaagtggaactgctcaaggggctgccgggcttcatgtacggcttcgccaccccgggcggcatcgtcaactacgtcaccaagaagccgaccgacaccttctccgcctcgttcgaactgggctaccgcgccgccaatgtctggagcgagcacgtcgacctgggcgggcgcgccggcccgaacaatatgttcggctaccgcctgaacgtgacgcacgaggaaggcacgccctacaacgcgcgcaatatcaagcgcgacagcgcctcgctgggcctggatgcgcgcctgaccagggacctgacctggaccttcgactcgatctaccaggaccgtcgcgccactggccagatgccgtcgttcagtctgtggagctacggcgacacggccctgccggccgcggtgtccggccgcatccgcaacttcgccggtgccgaccagcacctgaacaccaacctgcagctgtacagcaccggcctgcgctaccagatcaatccggactgggcggtgagcacaaactacagcttcaccaaggtcaaccgcagccgcaacgaaagcacctacaacctgctgaaccaggccggcgactacagcgaccagcgctacgacaccgcgcagaaccagcaggtgggccaatggcaggcgatgctggaaggcaagttccgcaccgggccgttcgggcaccagctggtggcgggcctgtcgtggcagaagcagatcgaccgctatgacaacaacggcttcggcgccgtcatcggcgccggcaatatcttcgagcccaacaccaacacgtacttcagctcgaccgccttcaacaaggtgcgcaacagcgacatcacgcagaagtcggtgttcgccagcgacaccgtccagctgagcgagcgctggtcggtgctggccggcctgcgcgtgaccaacttcgagcagaacggctacgtgccggtgagctccagctacagcaagaacggcgtggtcacgcccacgctggcgctgatgttcaagcccgtgcccacggccacggtctacgccagctacgtggaagcgctggagcccggctcgatcgtgccggatggctacaccaacgctcgccagctgctcagcccgatccgcagcaagcagtatgaagtcggcgtcaaggccgaccaggccgcctggagcgccaccgccgccgccttccgcatcgagcgcggcgccgagtacgacagcatcaacggcggcgtgccgacgcgccagcaggacggcacctcgatctaccaggggctggaactggccggcgtgtaccggctgggcccgcagtgggaattcggcgcgagcgcgatgtacctggactcgtactacgacaagggcctggccaacaacggcaagcgcgtcgccggtgcgcctgacctggtgctggccggacgcatcagctaccgcgtgccgttcgtgcccggcctgcgccttggcgtcgatggcaagtacaccggcaataccaagctgaacgcgggcaatacgctggaggccggcggctacacggtgttcaatctcggcgcgagctacaacacccgcgtcgccggcaaggacctgacgctgcgcgccgcgctgaataacgtgaccaacaagcgctactggggcttccagtacgagaactacatccagcccgcggatccgcgcagcgtgagcctgacggcgaagattgcgtattgagattggccggactgcaaggccgcccgcagaagccccgcttctgcggacgcctgccttcagtcgaccttgacgtccaggtctttcacgacgccagcccatttggccagctcggcgttgacgaagcggctgagttcggccggggtgctgcttgccggcgtcgccccctccccgttgaagcgctgaataagcttcggcgatgccagtgacctggcgacggcccggttcagcgcatcgatcaccggctgtggcgtatttttcggtgccagcaatgcattccaggtattgatctcgaagctgccgaagcccggcacttcacgcatggcgggaacatccggcagctgcggcgaccgctccctggtggtcacggcgatggcgcgcagcctgccggccttcacctgcggcagggcgccaggcagcgtggcgaagctcagttgcgtctcgccggcgatcaccgaagtattggcaagcgctccgccccgatacggcacatgcaccagcttggcattggcgctctgggcaaacatcgcaccggccaggtggaccggcgaaccgttgccgctggatgcgtagttcagctctcccgacttcttccgggccagcgtcaccaggtcaggcacgttcctggcgggcaggttcggggtcgtgatcagcacgagcgggatcgaggcgaccatgctgacgggcgcaaagccgctgaccggctcgtagcccagcgttttcttgtacaaggctgggttgatgccgtggctcgacacggttgccatgaacagcgtatagccatccggcgccgactgctgcacataggcggcggccgagttgccggccgcgccgggcttgttctcgatgatcaccgactgcttcagctcgctggccagttgttcggccagcgcccgcgccaggatgtcggtggtgcccccggccgcatagcccaccacgatacggatgggctgttgcggatattgggccgccgcgtgccctgccaggcccaggccggccacggccatcgcgaggacaagcctctgcttcgtgttcatgccatatctcctctcttttgtatgtgtccccacgtcatgcgtggcggtattgccgatattcccggatcgccgggatgtaacgcttattggcccttgaagacggggctgcgcttttcggcgaaggcgcgcttgccctcgcggtaatcgtcgctggcgaagcactgcatgacgagctgctgcatgcccgcgatatcgacctgcgggcccagctgctgcaattgacgaatcatgcgtttgccggcgcgcagcgtgaggggcgcattggcggcaatctggtccaggcgtgtctgcagcgtcgtgtcgaggtcggccgcatcggtcacgtgatggaccaggccaagggccttggcgtccgccgccgcatagcggttggcggtcaggaagatttcgagcgcattggcggcgccgaccgtgctgaccagattccggattgcggtgagccggtagcccaggccgagcttgccggccggaatggcaaaggtgctgtcggacgacgcgatccggatgtcacagcacagcgcgatattcaggccgccgccgatgcaatagcccttgatcctggcgagggtcggcttggcgtggtcgtagagggccagctgggcagcctctgccacttgctcataggccgcgacggcctcttcgccggagcgcaggttgtcgaactgcgcgatgttcgccccgctcacgaaggcgcgctctccggcgccagtcagcactatcgagcgcacttcgtcgtcctgctcgaacgctgcgagcgcctggggcagtgccgcccacatgtcgaatgagacggcgttgtggcggccagggtcgttgaaggtaatccagccggtgcggccgcgtttttccaccagcagggtatcggtaatctcgccttgcagtatgcgtgtcgtggtcatgttgtctttccaggcgctcgggccttatgtctttcaataccgttggtcaggtggtagcgcatggcggcgcgcgcctggtcggcgttccccgcggcaatggcgtcgaagatcgcgtggtgctcctgctcgacttccgcgatgcgcgtggtcccggtcgaggtggaacgcagcgtgcgcacggagtcgtggagcacatggctcagatgggccatcaagcggatgaagtacgggttgttggtcgcattgcccacagcgaggtgaaaatcgagcgcggtgtccgcgcccttttcccagtctgcgcccgcttcatcgaccttcgccagcgccagtcgcagcgcctccagctgcgcgggcgtgcggaaccgcgccgccagcgcggccgcgcccgattcgatctcgacgcgcagctggaagacatgctcgagcgcatcctcatgcagcagctcgtcggtgacgatctcgaagttgcgctgcccgatgccctgcgccacgaacgtgccggtgccgcgccgggtttcaacgtagccggccagcttcaggcgcgcgatggcctcgcgcacgacattgcggctcacgtcgaacgcggtggccagctcgttctccgtgggcagctgctgcccgtgggccagggtgccgtccaggatgcgctggcggatctggtgcgcgatctcgtcgggcaggttgtccggccggcgcaggctcgtgaatccgcgaatctccatgccaagttgggccttcatcagaatctccgtcatgtccgtggccccggaagcggggcaatcatggcggatatggtagcgcccaatcagatgaccccctgcgctgcaagcgcttcgatccgcgcggaatccaggccgagcagcgagcggtacacgtcgtggttgtgctcaccgctctccggtgccggcgccagttcgcccagcgaggtccggctcaggatcaccggctggccgacgacggagatcgtgcccagcctggggtgctcgatgggctggctcatgcgcagatgttcgacctgcggatcggcgaaggcctcgttcatgctgaggatggggccgcacggcaccccttcgcgattcatgcgggcgatccattcctcggtggtgcgggtgcgcgtgcgcccggcgatcgcggcgttcagcgccggccgattgcgggcacgcaacggcaccgtcaggaagcgctcgtccgcgatgagttcaggcacctcaagcaccttgcacagccgcgcgaagatgtcgttgcccatggcggcaatattcatgtagccatcctgcgtcgggaacacgccggtcgggctgctggtgggatgatcgttgccgctctggcccggcacctcgccattcatcagccagcgcatggcctggaagtccatcatccacagctgcgattgcagcagggaggtctgcacccactggccctggccggacacttcgcgttccagcagcgccaccatcaggccgatcgcgcagaacagaccggcggtcaggtccgcaacgggaatccccgcgcgcatcggtccgcgcccgggttcgcccgtgaccgacatcatgccggagatcccttgcgcgatctggtccagacccgggcgctcgtggtacggaccatcctgcccgaaccccgatacgctgccatagacgatgcgcggattgaccttgcgcagcgactcatagtcgatgcccagcttgaacttcacgttgggccggtagttctccaccaccacatcggccttgcgcaccagctccaggaacagcgcgcgcccctccggatgcttgaggttgagcgtaatgctctgcttgttgcgatgggtgttctggtagtcggcaaactgcgccgaaccgcccggcttgtcatcgggcgcctggcccggctcttcgatcttgatgacggtcgccccccagtcggcgaactggcgcacggcggccggaccggagcgcacgcgcgtgaggtcgagtacggtgaatcgggaaagcggaccatgccccacagttgtctccaattttgtctcttttccaggccatctacagatgggatgttggacatcctatattcaggattcgcacgaatcaagccgggggtaaacccctgaggacattccggattgggcgagaagacttcagggaaagcgaatgttgacaatcacgaatccgtgatctacaacatcgtctacacactaaatcaattttgtagacaattttgtagtcaataaaaagcagctttccaccggcgcacaccaaagagcccaacggccgcatgtcgcctatcgtcaagacacacatctgccaggagactcagatgatgcaaacgaccgcaacccccgccgacgcaccgcaggtgcaggccgggcatgccgcacacggcaacgccctgatcaagccggggtatgacgaacgcctgaccaatgaggacctggcgccgctgcgcaagcagacctggggcacctacaacatctttgccttctggatgtcggacgtgcacagcgtgggcggctatatcaccgccggcagcctgttcgcgctggggctgaccagctggcaggtgctggtgtcgctgctggtcggcatcctgatcgtgcagtacttctgcaacctggtggccaagcccagccaggtgaccggcacgccttatccggtgatctgccgggcctcgttcggcgtgctcggcgccaatatcccggcggtgatccgcgggctcatcgcagtggcgtggtacggcatccagacctacctggcttccagcgccttcctggtgctggcgctgcacttcttccccgcgctggcgccctatgccgacgtgaagctgcacggctttgccggactctccacgctgggctgggccgcattcatggtgctgtgggtgttgcaggcgctggtgttctggaccggcatggagaccatccgcaagttcatcgactgggccggcccggcggtgtacgtggttatgatcgcgctggcgatctggctggtgaacaaggccggctgggagaacgtcaatttcacgctgagcttcgtcaagtacaccggctgggaagcggtgccggtgatgctgagcgcgatcgcgctggtggtgtcgtatttctccggcccgatgctgaacttcggcgacttctcgcgctatgccaaggacttcaagtcggtcaagcgcggcaacttctggggcctgccggtcaacttcctgggcttctcgctgctgaccgtgatcacgacctcggccacgctgccggtgttcggcaagctgatcaccgacccggtggagaccgtcagccatatcgacagcaccttcgccatgctgctgggcgctttcaccttcatgaccgcgaccatcggcatcaatatcgtcgccaacttcgtttcgccggcattcgacttctccaacgtctcgcccaagcacatcagctggcgcaccggcggcatgatcgcggccgtggcttcgatcttcatcacgccgtggaacctgtacaacaatccggcggtgatccactacacgctggacgtgctgggcgccttcatcggcccgctgttcggcatcctgattgcggactactacctggtgcggcgccagcatgtcgacgtcgacgacctgtacacgctgaacccgcgcggccgctactggtaccgcaacggcttcaacccggcggcggtggccaccatgatcccggcggccatcatcccgatcctgtgcgtggtggtgccggcctggcagtccgcggccaactacagctggtttatcggcatgggcattgcgctggtgctgtaccggcaactggcgccgcgcatgatgcccggccacttcggcagccgtgccgccagccaggcctgagccccggaaccattctttcgactgcacgatttcgaccgcacttagcagagccgcgtctatgaagctgaagatcatcaaccccaataccacccagagcatgaccgacaagatcgggcagtgcgccgtcgccgtggcggcaccgggaacgcgcatcagcgcggtcagcccgcgcatgggaccggcttccatcgaaagccactatgacgaagccctgtccgtgcccggcatcctcgacgagatcctggccggcgagcaggagggcgtggacggctacgtgatcgcctgcttcggcgaccccggcctgtacgccgcgcgcgaggtggcacgcgggccggtgatcggcatcgccgaggccgccatgcatatggccagcgtggtcggcagcagcttcagcgtggtgaccacgctggcgcgcacctgcaatatcgcctggcacctggccgagcgctacggcatgaagcgcttctgcaacaacgtgcgcgcctgcgacctgcccgtgctggaactggagcgcccgggctcggacgcgcgccgcatcatcaccgaggcctgccgccaggcgctggttgaagaccgcagcgaatgcatcgtgctggggtgcgccggcatgaccgacctgtgcgacgagatcgccgacgccatcggcgcaccggtgatcgacggcgtggtgtgcgcggtcaagatggccgaggcgctggtctcggtgcgcctgggcaccagcaagcgcggcgactgggcgcggccgctgcccaaggcgtatgcgggcatgctggccccttatgcgttgaactgaaccgtatgacttcccgatccaattccgactccaccaccatgctccagtcccgctatccacgcgatctcatcggttacggcgcccggccgccgcacgcccgctggccgggcggtgcgcgcgttgcgctgcagttcgtcctcaactacgaagaaggcggcgaaaactgcgtgctgcacggcgacgccgcctccgagcagttcctctccgagatcgtcggcgccgcggcctaccccgaccgccacatgagcatggagggcatctacgaatacggctcgcgcgccggcgtctggcgcctgctgcgcgagttcgagaagcgcggcctgccgctgaccatcttcggcgtgtcgatggcgctgcaacgccatcctgaactgacccgcgcctttgtcgaactgggccacgagatcgcctgccacggctggcgctggatccactaccagggcatcgacgaagccaccgagcgcgagcacatgcgcatcggcatgcagatcatcaaggacctgaccggcgaactgccgctgggctggtacaccggccgcgacagccccaacacgcgccgcctggtggtggagcacggcggcctcctgtacgactcggactactacggcgacgacctgcccttctggaccgaggtggaagtcaccggcggcgagaagaagccgcacctggtggtgccgtacacgctcgactccaacgacatgcgctttgccacgccgcagggcttcaataccggcgaacagttcttccagtacctgaaggatgcgttcgacgtcttgtatgaggaaggcgacccgagcggccaggacagccccaagatgctgtcgatcggcatgcactgccgcctgctcggccgcccgggccgcttccgcgcgctgcagcgctttctcgactatgtgcagggacacgacaaggtgtggatctgccgccgtgtcgatatcgcccgccactgggcgcaggtgcacccgttccaagccgcgggcgatgccgcagccgtgggcacgatgcccgaggaagttgccccggcctgacaaatgccgtccgtgtcgccatatttgtgtacgatatagccgtctttcgtcgccagttccggcgacaggctgaaatgtccgtcccctgatatggcaaccacatcgaagaaggcggcgcccggcgcggcagcaaaaacgccgcgccggcccgcgtccaaggcaaccctgaaaacggcacccaaggccgccgccaatgccgcaccggaggaaagcgccggcccggaggccgccgccagcgaagcttccgccaccgaggccatctacctcagcctgctgaccgcgatcatggagcatcgcctgctggccggcaccaagctggtcgaggaacggctgtgcgaagtgaccggcgccagccgggcccgcatccgccaggtcttcgcgcgcctggcgcatgagaagctggtcacgctggtgcccaatcgcggcgcctttgtctccagccccacggtggacgaggcgcgcgaggtgttccaggcgcgccgcgtggtcgagcccgcgctggcggccgaactggcccagcgtgccacgccggccaaagtccgcagcctgcgccgccatgccatggaagaagacaacgcgcgcgcgcgcggcgaccgcgccgcgatgatccgcctgtcgggggaattccatatcctgctggcggagatggccggcaatgccatcctcgaaaagctgatccgcgagatggtgtcactgacatgcctgatcatcacgctgtatgaccgccccggcgcaccggcctgcgccgagcatgagcaccgccagctgaccgacgccatcgagcagcgcgacgccgcgcgcgccagcgcgttgatggcggaacacctggaacacatcgagggttcgctcgacctgagcgtgcccgacagcggcgcgccggacttctacagcatcttcagcaagggttgaagcacggtgcgggggcgccagcgggcgcctcatggccggcattgcactccgcgcccggcaacctagactggctgcataacaatgccgcgcgcaatgcgccgcagggaggtgcgccatggctgtcgctgcagaacccgtcacaaccgcccgtccaccgctggccttcgaacggctttacgcggatgccgccggcgaatcccacttcggccccatttccgttgccatcaccgagcgcctgttcgcgccgcccgcgcgcgccttctgggtgtcgccgctggacgaagccgcgcggcagggcttcctgctggtgccggccggctgggtgggcgcactgcacccgtcgccgctgcgcatgtggattttcgtgctggctggtgcgatggagttcgaagccagcgatggcgagcgccggccgctgtcggcgggcagtgcgctattgctggaagacaccacgggcaaggggcatgtcagcagggtcgtcggtactgccgatgccacgctggccgtggtgcagttgccggagaaccgaagctgagcccgcggcgtgccggcagggctgtggccacgcaacacgatcacggagccccatgatgattgctcccgagccagcggctccgcccaagcccgcgccgcaactggtgcccaacggctaccgccagggcatcatcaccgcgatcacggtgctgctcggcttctcgctggcgttctggcggttctggggcttcgagagtcccggccactggaacctgcgcgcgctgttcgccgcggtctcgctactggccgcggtgtcgctgcagatcgtggcgctctaccgcgcgctgcgcatcgaggacgatgcagtggatgaataccgcaagaccgtgcgatggttcatcgcgtcggcgcttgcgctgctggtcgggctggccgtggccatgatagacgcggcactcggcccctaggccgcccggcagtcacgctatccggcccgggaacgaacctgcgcctgctcctggctcgcgtcgcagatagcgcacctgcagcaccgcccccgccaggaataccaggaacagcacgccgacgatccccttcagttccggcgcttccgcattggcaaagaccggattgcccaccggcaggcgcgtgccggtctcggtcaggcccgggatgaagtggaagaacaccgtcagcgacagcgacaccacctccacgtagcggctcatgcgcccgaatgcaccgcgtgccgcgcagaccgcgaccgccagcaccagcagcgtgacgatgcccagcacatggggcttgccgaatccgccgtgctggaagatgccaaacccggtcaggcaactcagcacggtgccgatgacataggccagtccgagccgggtatgcaggcgcaccatgccggtgctcgagagcgccaccaggccgcaggccagtcccgccagactgatcagggtatggatgatgccaagctgcgtgagtccgagcatgatggtgcctccagccgggtgggtgccgcaatggatctggacaggcgtggcggcgcgcaagacaaggcgagttgcgtgggggcgggccgcaacagcaagccttcatgtaaggcgaagcttgcggggattgcaaggatggcggcagccgcggggcacccgcctttgccgatgtcagagcatcggggcaccggcccttgcagactgcgccatggcctggcgcgccaccgcgacctcggccctgccgcgccggtgcgatccctgcaggcggcgcagcgccgcagcggcacccgcctcgatcatcacgcacagcacgaagtagagcagcgcaaccgctgcgaacacttccgccgcatagctcatgctgcggccattgacctgcgtggccagtgtcgacagctcactgacgccgacgatataagccagcgacgtatccttggtcagcgccacccaggtgttggccagggacggcagcatggcgcgcagcgcctgcggcagcaccacatgccagagtgcctgcgtgcgcgacatgcccagcgccagcgccgcctggcgctggcccgcgccgatcgcggcaattcccgcgtgcaggctctgcgcgataaacgcggcgcccaccagtgccagcgccagcaccacggtcagcacttcgctgacctgcacgccggccagcatcggcagcaagaagtaagtccagaagatcagcatcagcaccggcaccgcgcgcagcaacgccagcacggcgcgcagcacgcgcgtgacgctggatggcgcaagctccagcagcagcgccagcgcaatgcccagcaccgtggcgccggcgcaggcgagcgccgctatccacagcgtcagcgccgcgccggccagcgggccctcggggaaagcgcctttgagcaagtagggcagctggccccataccagcgccaggcccgccggcaggcttgccatcccatcaggcatgacgtgctccggtccagccgaggcgcctgagcaaggccggcgccaccgcctgcagcgacaggatcaacgccgcatagagcagcgtggcaatgccgaaagcctggaaggccatcagcgtatcggtctcgacctggcgcgcggtgtaagagagttcggcaaagccgatcgccatggccagcgaggtgttcttgatggtctggcaaaactgccccaccatcggccgcgccgcaatccgcagcgcctgcggcagcacgatgcgccaccacgcggcacgcggcgcgaagcccagcgccagcgccgcggcgaactgcccgcgcggcaccgcggcgattccggcttcgagttcctgcgcatagaaggcgctggcatacagggcgatgccgaatacgctggccagcgcttccagcgacggcgcgggaatggccacggcacacatctggaggccgcgccagtccgagatcgcgccgatggccgcatcgcccagcaattgcgcggcaccgaagtaccagaagaacagctgcaccagcagcggcgtcttgcgcagcagcccgatcaccgcattggccgcgatggccacggggcgccacggcaccctgcgcagcgccagccaggctgcggccagcgcgcagccgagcaggaacaccgccagcgacagcgccaccgtcatggcaaagccgccgagcagccagtgcaggtatttggccggcaacgactgccagagaatggaaaccatgggtcaggggcgatcaggctgtggcgtgcttacttgaccgtgctgccgatggtgaagtcgcgcgccagcggcgcctggctcttcggcccgaagtacttgtcgtagatgcgcgccgccgtgccgctcttctccagctccagcaggatctggtcgatggcggcctgcaggcgctcctcgcccttgggcacgcccacgcccatgtattcgcgcgtcagcgtgaagggcgagatctcgaactggtcgcggttgggcagcgtggccagcagcgcgccgagcttggcgccgtcctgcgcaaaggcctggatcgcgccggtgcgcagcgcctgcagcgccagcggcgaatcgtcataggcgatcacgcgcgcgtcggggtagcgctggcgcagcgtggtttcctgcgtggtgcccttgtccacgcccaggcgccaggccttcagttcatcgggctggcgcagcgcccccttccttgcgatgaactgcagcccgctggcaaagtaaggcgtggagaagccgatctgctggcggcgttcatcggtgatggtgaagttggccgcgacgatatccaccttctgcgaggccagcagcggaatgcggttggcggggttggtggcgcggaactccgccttgacgccaaggcggctggcaatctcgttggcatagtcgacatccaggcccgctggcgcatgcgtcttcggatcgacaaagccgaacggcgggttggcatcgaacacgcccacgtgcagcacgccggccttgcggatatcgtcgaggcgatccgccagcgcggtaccggaggccatgacggcaacgccggcgacgatggcgccgcgcagcaggaaggaacggaaggacatggaaggcactcactgaagtctggatgggcagacgatagcggtgcgcgccccgatcaggaacgaatggtttcgcagatggatatgccgccatgccgggcggcgcgcgctcaggcgccgagaatctcgatgctgtcgacgcggtccgggtagaaggccaggtgcgaggcgatcgccgccaccgcggggtaaggcgtctcgtagctccacaccgcattgcgcgcgcgctcgccgccggcggggatggagaagtagctgcaatcgcccttgtatgggcagtacgtcgtgtgcgcggtacgctccagctgcgccaagtcgacatgctcgcgcgggatgtactgcaccggcgggtaggtcgcctcttgcagggtcagcgccgcgtcgctgtccgcaatggcaatgcccgccaccctgaccaccaccctgccggccgtcggcgtgatggtgatcgggtggtcggggccggggatcctgactggcttgtcggtcatggcgcgtcctcctgcagggcatcgtcacgggggcgatgctgcattctaggcgttcgccgcgcggcctgcaggccgcgcccgatggttcagcccagccgccgctattcgaccttgacgttggccttcttcaccagtgcggcgtagcgcgtggcctcgctgcggaagaagctggcggccgcctcgggtgtgccgggctcgatcacggtggcctgcttcttcatggcctccagcacttcgggcgaggtgaaggccctggcaaatgcgtcatgcacgcgctttacctctgccggcggcatgccggcggggccgaccacggcaaaccagccggcgacgttgtagtggggcaagccttgttcggcgatggtggggatctccggcgcggcggacgagcgcttgtcgccgcacacgccgatcgcgcgcagtgtgccggccttcaggtgcggcgccaccgcgttgagcgcaaccacgcccagttccacctgtccggcgatcaggtcgttcatcatcgggcccgtgcccttgtacggaacgtggcgcgcactcacgccggcctcgtccaggaacatctccccggccaggtggatgatggtgccgttgccggacgagccgtagttgtagccgtcgggcctggccttgagcagcgccaccagttccttcacgttccttgccggcaccttgggattcacgacaagcaccagcggcgtggtgccgatcacgctgatcggggtgatgtccttgatggcatcgaacggcatggtgcggaacacgctcgggttgatgacatggttgttcgagaccagcccgagcgtgctgccatccggctgcgccttgaccacggctgcggccccggtgataccgccggcgccgggcaggttctcgatcaccaccggctggccaaaggccttgcccagggccggaccggccgcgcgcgcgatggtgtccacgccggaaccggcgctgatcggcaggatcaggcgcaccggtttgccggtattgccctgcgcgagcgcgccgatgccgggcgcggccagcgcggcggccacggtggcggccagcgccagcgctgacttgagaaggatgcgacgggggtgcatgaggttgtctccgtatcgttatcgtaggatctttgcgggctgccgctgtgccgcggcatgcccgtcgtggtaccggtcagccggcgcggccctggccgagctgcaacaggatctcttcgttgtgctcgccggccctgggcagcggccggcgcacgcccgggcggcgcccgcccatcagcagcggcagcagcaccgtgggcgtggtcgagccgtcgtcggcctgcatcggcaccagcccgccgctggcaagcaggtgcggatcgtcgagcagctggtccgggcgcacgatcggcgcataggggatgccggcggcttcgagcctgggcgccagttctgcgctgcggtggtggcgcaggatcgcgcccagctcatcgagcagttgcggacgcaccgccacgcgcgaggcattgctggcgtactcgggcttgccgagaagctccggatgctccagcacctggcacagcgtcgcgaactgcttgtcgctgaccgcgccgataaacagctgctcgtcgccggccagcgtaaagacgtcatacacgctccacgccgacacgcgcgacggcatcggcggcggcgcctcgccggtcatcgcaaactgctgcatatgctgcgaagccaggaatacgcagttctcgaacagcgcgctctggatctcctggccgcgcccggtgcggtcgcgctcgcgcagcgcggccagcacgccgatggcgccgaacatgccgcccatgatgtcgttgaccgaggtgcccgcgcgcagcggccgcccgcttgggccggtcatgtaggacagcccgcccatcatctgcaccacctcgtcgagcgccagccggttctcgtacgggccgggcaggaagcccttgtgcgagacgtagatcaggtgcgggtagtcgcgcgacagtgtggcgtagtccagccccagcttctgcatcaggccgggccggaagttctccagcagcacgtcgctctggcccgccagctcggccgcggcggcacgcccttcctcggtggtgatgtccagcaccacgctcttcttgttgcggttgaaggcgcggaagaagccgatgcccaggcccggcaggttgcgcgtcttgtcgccgccgggcggctctaccttgatcacctcggcgcccaggtcggccaggatcatgccgcaggtggggcccatcaccatatgcgtgaattcgaccacgcggatgccggccagcggcagggagttgctgttgtcttgggtcatcttgcgtctcaggcagcggcgccagcaggctgggccgggaaggtcttgggcaggccggcgcgccacagcgtgccgtgcagggtttcgtccttgagccagccagccacgtcttcacgcagcgccagcaagcggccgatatcgatgccggtgtcgatgcccatgctgccgagcatgtaggccaggtcttcggtcgtgacattgccgctggcgccgggcgcgtgcgggcagccgccgatgccggccaggcaggcgtcaaagcgggtcacgccggtttccagcgccgcgtggacgttggccaggccaagcccgcgggtatcgtggaaatggccgcaccagaaccgatcgccggcgatatcgacggcgcgcgcaaacagctcgcgcaccatgtgcgggtcggcatagccgacggtatcggccaggctgacgcggtcggcgccggcatcgagcagcgcctgcatcaggcgcagcacttcatcgggatcgacatggccctgcagcgtgcagccgaacgcggtgccgacaccgccttcgatcagcgtcttcgcgccgctggcatcgcgcgcggcgcggatgcgcgccacttcagccaccacttcatccggcgtcttgcgcaggttggccaggctgtgcgcatggctggccgacagcggcacgagcatcaggtccgcgccgctggccagcgcatcctgcgcgccgcgcaggttcggcaccagcaccgagacgaacaaacccggcagcgtgcgcgcgaacgcgaccagctgcgcggtatcggccagttgcggcagcaggtgcgcgggcacgaacgagcccacctccagctcgcgcagaccggccgcgtacgcgccgcggatccacgcttccttgctggccgtgggcaggatggtgcggatgctctgcaggccatcgcgcaatccgacttcgcggataacggcgtggcggggaaagggaacagacatgattcaggggcttccggtttgcgccccgcagtggggcgacggaagaactctatgagtttctgcccaagagctgaagcggtgattcgcgcacgataacattccgaaccggaatgtctgccgggcgccgcacagctacatccagaaattcccggatgaatgattaccggcaaccaaaggggcttaacattccattccggaaacacgcagccccttaccatgcgagacctcgacctcaccagcctgcgcctgttcgtcgccgtctgcgaaacccgcaacatggcgcgtgcgggcgagcaggagcacatcgtggcatcggccatcagcaagcggctggcgcaactggaagggacggttggcgcaaccctgctggagcggcgccgccgcggcgtgatcccgacgcccgcgggcgaaatggtgctggcgcatgcgcgcgccatgctggcggcggcggaccgcgtcgcgcgcgacatggccgactacggcgcaggcatacgcgggcaggtgcggctgctggcgacggtgtcctcaatggcggaatcgctgccggacgatattgccgccttcctgcagcagccggccaaccgcgatgtgcgcgtgaccatcgaggaaagcctgagcagtgacgtggtgcgagcgctgcgcgagggctcggcgccgctgggcatctgctgggacgcggccgacctggaaggcttccagacccggccctaccgcaccgaccagctcgcggcagtggtccacgcctcgcatccgctggcgcaggccgaggactgccgcttcgaggacacgctggactacgaccatatcggcatgcccgcccagaccgcggtgcagaccatgctgacgcgctatgcggccatcctcgggcgcggcattggctaccgcgcggtggtctcgaccttcgacgctgcgctgcgctgtgtgcgtgccgacctgggcatcaccatcatcccggccgagatcgccgcgccgatcgcgcctaccttcggcctgcgcgtgatcccgctgcgcaacgactgggcgcggcggcgctttgcgatctgcttccgcgacctggaactgctgtcgccggcggcgcggctgctggtggccttccttgaacagaccgcggcggcggaagcggcggccgcccccgcggacaccacgccagcgcgcaagccacggcgcaatcggcaatgacgcggcgtggcgcgcaacttcctgtgccgttcaagggttagcccgaggcaatttcgcaagcaaatgttggggagcggtgcgtagactggcttgcgtttttcgccccggcccacgatggtaaaagccggcccccgggcgatgctgacccgaccatgcgcgccacgacggcgcaggagcacgcaaatgaacttcaacggcaagaacgtattgatcaccggcgcacgcggcaacctgggccgcgccgtggcacaggccttcgcgcaggcaggcgcgcgcgtggtgctgctggaccggcatgcagcgccgctgcccgaagcgggcaccggccacctcacgctgcaggcggacctgctggatgccgccaagctgagcgaggccgtcgcgcaagcggttcagtcatgcggccgcatcgacgtggtgtgcaacctggccggcggcttcgccatgggcccaagcgtgcatgaaaccagcgccgaggcctggaaccacgtgttcgacatgaacgtgggcacggtgctgaacatggcgcgcgcggtggtgccgcacatgctggccgccggcggcggcgccatcgtcaacgtgggtgccaactcggcggcgcgcgggctggcgcagatgagcgcttattgcgcctcgaaggacgcgctggcgcgtgtgaccgaatcgatgtcggcagagctgcgcgaccagggcatccgcgtcaacgcggtgctgcccagcgtgctggatacgcccgagaaccgccaggccatgccggatgccgatgccgcgcgctgggtcagcctggatgcgctggccgacgtgatcctgttcctggcctcggatgcggcgcgcgcggtgcagggcgcgctgctgccggtggtcaaccgcgcctgacgcggggcttgcgcgcggccggctcggccgcgctgatggcgctggccgcctcctggatctgctggcgcagccagcgccgcagccggtcggcatcggtgcgcgcgtgccagatctgcatcatgtcgacgtggggcagcgcgaacggcaccggcagcagcaccagatcagggtcgcgcgccacggcctcttccgcgaccgagcgcaggcaggtcagcagcagttccgtgccgcgcaccagccggctcggcgcaaggaagctcgacaatcccgccaccaccctgcgcttgtgcccctgccgggcaagcgcacggtcaaccacgccgttgaggtcgccggtcagcgtggtcagcaggtgttcgcacgccaggaaggcgtcgagatccaggccatcggcgatgcgcggattggcgcgcgaggctagcaccacgaagtcctcgctgcacagccgctgctggtggaaggtatcgggcaggttctcatagaaacccgcgatcgccaggtcgcaggtgcccttctccagttcctcgcgcggcagctcgccgcgcgtgttgtgcgtgaccagcaccacgcccggcgcctggctgcgcagccgcggcagcagggcgggcagcagcagctgctccatgtagtcggtggtgtagatgtgcaggtgctcgctgcgcgccaggtagtcgtggccggcacaggcatcatagaacgcgtcgagatccccgaccagccgctgcacctgtggcgccagcgcgtgcgcacgcggcgtcggcgtcaggccgcgcggcgcacgcacgaacagcggatcgccgagctcgtcgcgcaggcggttgagcttgtggctcagcgccggctggctcagcgccatgcgcgcggccgcgcgcgaggcattgccctcctgatacagcacgtggaacacgtacagcaggttcaggtccttgctgccgatattcattttttggatagcagagatctaataatagaagttttcgaatcatagtccgctgcctaggatggtgccagtgccgaggcatttctcgcccggctgcctgtgaaccgacatggagcggaacaatgaaaatcctgatggtgctgacatcgcacgaccagctgggcaataccggcaagaagaccggcttctggctggaggaattcgcagcgccctactacgtcttcaaggacgccggcgccgacatcacgctggcctcgcccaagggcggccaaccgccgatcgacccgaaaagcgacgatccgggcgcccagaccgacgccacccggcgcttccagggtgacccggccgccagggccgcactggccagcacgctgacgctggaccaggtgaaggcggaagacttcgacgccatcttctacccgggcggccacggcccgctgtgggacctggccgaagacaagcgctccgccgcgctgatcgagcagttcgaccgcgccggcaagccggtgggagcggtatgccacgcaccggcggtgttccgccataccaggggcgcggacggggaaccgctggtcaagggcaaggaagtgaccggcttcaccaacagcgaggaagaagccgtgcagctgaccaaggtagtcccgttcctggtggaggatatgctcaaggccaatggcgggcgcttcacgcgtggcgaggattgggccagccatgtcgtgatcgcggggcggctggtgacggggcaaaatccggcatcgtctgatgctgcggcgcaggcgctgttgaagatgttgaagtaagggaaggcggcaaacgcgccgccgccggtttgcacccctcgcccgcttgcgggagaggggtgcgtacgccgagcttgatggctacttcaaacgcatgggttgtcccacttactgcggcaccaactccaaccgctcccggctggccttctccaccgccttgcgcgtatacaccagcgggaaatactcccccttggcccacaacggcgccaggtcgcggtaatgcgggctggcgggattgcccgattgccccggcgtgttgatcacgcgcgaggcatcccagttgcccacatccagcaccatgcggaacgacgcgcccgcggtcagccggaagtcggtattgcggtagctggtgttcatcggcgtgaaggccgagccgccgatcggaccggcgttgacattgaactgctggcgttccgcgtcgctcaggatcgggtccatcggatgcgtgaacacggcagtgtgaagcttgccccattgccatgcgcgcgggtcggggccgagcttgccttccgcttccgccatggcggccttcagcgattcgagcatcaccgcattgcggcgctccaccggcatccacggaccgggctgctccagcaccgccaccacgcgcgcggcatcgccggcaccgaccaggcgtgcggcttcgggcgtcagcgcggcgcgcaccacggcctggcgcaggtgtttgctgaaccagacttcgaacaatgccgctgcggcgctgtcggcacgctcgttgccgtcccagccgcgcagcaggtccaggccgcgggccagttgcgggtcgtcgctgcgcacgtccctcagcagcgccaccacgcgctgggccggcagcgaaacggtgtcgttctgccacgccatcgagtcctgcgccgagctgcgcgcattggcgcccaccacggccttgagccggcgcgcgcgcgagctgtcgctccattcatagcccacgccaagtttcgcggccgggtgctcgggcgggatgttgttctcgttggcggtgacgatgtagcctggcgcggggttgtaggcccacggcagctcgtccatgttgcggtagccggcccactcgtagcggccatcgcccgccaccggcgtgaggccgtcccagttgggccgcttgacggtcagcccgcccgggatccagccgatattgccgctggtatcggcatagacctggttctcgccgggcgcgccccagcggttcatggcggcgcggaactggtcccagttgcgcgcgcgcatatagtccatcgaaccgaagtacggcgccatgccgtagtcgagccacgcggcgcgcagcgcccacgcctgcgcgcggccggcatcggcaaccagcaccgggccgtggcgcgtgaagtcgatggtgaccttgcgcggcgcggactcgcccttgaccacgatctcttcggtgatgctctccatcggttcccagcggcccttgtacttgtactcatgcgggttggccggattgagctcgtagccgtacaggtcttcctggtccatgtagaagcgcgtcaggccaaaggcaatggtgccgttgtgcccgatcgagatgccgggcaggaacggctcgcccgcgccgatcaccgacatccccggcgcgttcaggtggctgatatagcgcaggctgggcgcgccgtgcgagcggtgcgggtcgttggccaggatcgggcggccggtggtggtgcgcttgccgccgatgacccagttgttcgatccgaggctgcggccggcgtcgctgttggggtccaccagtgcgtagagctggtcgagcgggatgctggcggcctgcgcattgccccacgcctctttcgggaagcgcgctgcggcggtggccagttcgtaggcgcggcgcagttcggcggcgggaaccgtgcaggggtcgatgccggggctgagcctgggctcgatctgcgggtcgagttcgcggcgcagccagtcggcacgcggggcgtcctgtttggcctggcaatagagctgggcgcgttcgacttcgccggtgaagttgagcgtcaggccgtggtggcggatgcgcacgatatcgtcggcacgccagcgcgcaggcttgtagttgagcttgcggaattccggcggcagcagctcgggcttctgctcggtcagcgccacataggcgttcaccccggccacgaaggcctcggccacgcgcttggcgtcggagccataggccagccattcgcggtacatgtcgccgcggaacagcaccgcgcgcgccatgcggtcgccatcggcataggccgggccgaagtccctggccatttcgccgagtccgcgcttgcgccacaggtcgatctgccacaggcggtcgcgcgcggccatgaagccctgcacgaaaaaggcgtcgtagagcgtgccggcatagatatgcggcacgccccagcggtcgaccagcacgctggcgggcttttccaggccgggcacggccagcacgttgttgcggacgggggcttcggccatggcggccgggatggtggtggcgagcagggccagcgcagcggccaggcggcggggggtgcgtaacatcaggtctcctcggtgttgtgattggctgcagatgtcttgcagttcacaccgaagatagtgcatcgccggccagcgcgcgagccgcgcggccgatctccgcacggcgtgtgccgctgcgggttcgctcagtagacgtcgcgccggtagcggccgtcgtcggcaagccggcgcagcgcgtctgcgccgaggatcccggccagtgcgtcatggacgccgccggccatgccctgcaggctgccgcagacatagatggcggcgccgtccgccacccattggcgcaccgtatcgccctgcgcgcgcaaggcgtcctgcacgtagcgcggcgcgccgccgtcacgcgaccaggcatggtccacgcgctgcagcgtgccgtcggcctgccatgcggccaggtccccggcaaagaacgcatcatgctgcgccgagcgctcgccgaacagcagccagttgcggcgccgcccggccgcggcgcgggccttgagctgggcgcgcagcccggccagcccggtgccgttgccgaccaggatcaggggccggtcatcggccggcgggtggaagctgcggttggtgcggatgcgcagcgcgatgcgggtgcccacggccgcgtgttcggtcagccagccggaggccaggcccaggcggccgtcgtcgtagcgggtctgccgcaccagcagttcgagttgcccgtcccgcggcagcgaggcgatcgaatattcgcggtgcggcagcggcggcagcgtgtccaccagttgctgcggcggcaggccctgcatcgccgcgaagtgcgcctcaggcagcggcatgcgtgtgcccagcgcctcggcgagcgtggcgtcgcggccgtcgcagcgcaccggtgtggcgccgtcgaggccaagccgcgccagcagccgttcaacctcggccggcgcgtggcacgggccgatctcggcgatgtcgccggcttgccagtccattgccgcatcgtcctgcggcgccagcgacaggtggaatgccggcgcgccctggctgccggggttcagatgacggcgttgcgcgagccgccagctgtcatagcgcgggcgttcccagtcggcaatctccgcgccgccgctcagggccgacaggtggttctgccagtggcgcagtgcgccggcgtcgccgttgtcgacttcgaccaggtcaaagagcggctgcgcgcggtgacgctgcagccagccgtcgagcgcgtggccgaaggcgcagaagcgcgcgtagctgctgtcgccgagcgcgaggatgccgtagcgcaaggactgcaggccatccgcgccggccagcaagcggcgcgcaaaaccggacgcgctgtcgggggcgtcgccctcgccggtggtgctgaccagaaacagcgcctggcggcatgcctgcaggcgccgcgcatcgacatcggccagcgacagcagttgcaccggcacccccgcgccgtgcagcgcgttggcggtctgcaacgccagttgttcggcaaacccggtctgcgaggcgtaggcaaccagcgtcgcgccctcttccgtgccagccagtgccaccacgcgcacgcgccgctggcgatggtgggcaagcaccgcgctgcagaagcccgcataggcggccaccacgccggccgccatagccatgcgcgacggccccagcacggacagcgcgacgccgccggcaacggcaagccagcttgcgccggcgatggcggacggcatggccttcgcgctcatgccagcatcgcggcaaaggccggggacagctgttcgtcgaagccgcccggcgtgcgcaccaggaagcgcgcggcaatgccgtggcggcgcgcgtgcgccatgcctgcctgcgggcccagcacggtcagcgcggtggacagcgcatcggccagcatgcactgcgcgtggatgaccgtgaccgaggccagcgcgtggctggccggatagccggtgcgcggatcgatggtatgggcgtagcggcgaccgtcactgtcgaaatagcggcgatagtcgccggaagtggcgacggacaggccgtgcagtgccaccagcgtctgccccgcggcatcgctgcccagccccggcggggcctccagcgcgacccaccacggcatgccgtcgggcttgacgccatggccgcgcagttcgccgccgatctccgtcaagtggtggtcaaggccctgctcacacaggtagcctgccaccgcgtcgacggcaaagcccttggcgatggcgcagaagtccagcgacacgccgcccggctgccaggcgcgccggcccgtggcatcgacttcgatgcgggcccagccgcagcggccgcgcgtggcctgcaccgcgtctggcgacggcggcgcggtgcgcgccggtgctgggccgaagccccacaggtcgaccagcggaccggcgctcgggtcataggcgccaccgctgtcgcgcgccaccagcagcgcgcattgcagcaccatgaagcagtcttcaggcagcgcgtgccagctgccgggtgccgcgccgttgaaacggctcagatcggaatccgcttcccagttgctcatctgcgcgatcacgccatctagaacggcctggatgccggcggcgatggcgtccgcatccgtggccggcggcagcagtgccgccaccgaccaggtcgtgcccatggtcgcgccgccccagcgctgcagccgcatatcggctgcgggcggctgtgggggcgcggtcagcgcaacaggtaccaggacgcggttcaaacccggcaaccggcttattgcggcagcacctcgaccgtcaccgcatagacggcacggcgcgatttggcctgcttgaaggtggtcttgtcatccttcacctcggcttccatccagtacatgcctggggccggccacttgacgctgaacttgccgtcggcgtcggtggtggcgctgaactcctgcagctggtcgcggtagcggatgccgcccggcaccaccgagaccttcaggttgctggcgggcttgccgtcgagcagcatgcggaagctggcggtgtcgcccgcgaccaggtcgttcgggtgcgtgatcggggccagttccaggccgcggccggcggtgcgcaggcccttgtcgctgggcttgccggcggtgatgaaggattcgatgcggccttcggcctgggtggcctgcaggtcctgcgcattggccgggacttccttggcgaagttctcggccgaaccccgccagcgcttggcctggccgtcgaccttgtagctggcgaacaggccgttgttgaccaccgccacgcggtacgtgccgggctgggtcaggtgcaggtcgaaggtgctgcggtacttgccggtggcagcgttctcggccttgacggcgctgccatcgggcgcggtcacctgcaggttgtcgagccgcatcggcacgtgctcgaaatagaacaggtcgttggagacagcggcgtccacggtcacccacggatcgctgcctgacagcacggtagccgacggcagcagccactggcggtgcgcgtgcgcggccagcggcgccagggcggccagggcgagcacggccacgcgggtggcgatgcgggtagatgcggcggacataagggaaggtttcatcgtctggctccggaaggattacggcttcagttcgacggtcacgccgccgagttcgtgttcgcccttggcgcgggcggtctgtgcggcttgcggcggccacgtgaacggcacgcgcagcagctcgcgcccgcccacttcacgcgcggcttccaccaccagctggtagttgccggcgggcagcttgcccagcggcgccttgtcgtcgctgaagctcacgccgtgctcgcccggcgcgcgcgtggcgccggagatgccgtcggccggcatgtgcaggtcgcggccggccttgcgccaccactggcgcatgtccttgagccacttggtgccttcgccgtccctgagcttgccgtcgtaccagaccgccagggtctgcaccgggctctggtcggcgcgctcgacccacatcgccacataggggcggtggtactcggccacggtcaggcgcgggatttcgaccttgacgttcaggtccgcggccagcgcggggccggccaggggaaccgcggccatgccggtcagggtgacggtgagcagtcggcgcatatcggagaaacctcgtcagtgggatgcaggaaggaaaacggttggaacggttgactcaatggataaacaggagcgccagcagcaccgggaccaccagccccagccccaccagcggccaggtccccacgcgcccggccgcatgcagcttgagcaggaacaggccggtcacgctgaagaccaggcatgccagcgcgaacacatccaggaacaggctccacgcggcgccggtgttgcggcccttgtgcaggtcgttcaggtaggagatggcgccgcgcgtggttttctcgtactgggcttcgccgctgtcgagttccaggctgacccaggcgtcgccgcccggacgcggcagcgccacgtagatctcgtcggcggaccattcggcctcgcgcccgctggcgtcgatgtccagcgcctgcgccagccagtcggccagcaccggcggcaccggcgccttcttttcacgcccctgggcatcgcccgccggcgcttcggcccgcaccttgtcgagcacgcgcgtgggcatggtggcgtggcgcgtctcgaccgcgggcctggcctcgatctgtgcggcgtggttgagcgtgaagccggtaacggcaaacatcagcatcccgatcaggcagatcgcggaactgatccagtgccactggtggagatgcttgagccagaaggcacgccgctgttggccggaggccggctgggtttcggtcattgcggttggtcggcgggcgcggcccaagtggcggcccggtcttgccttgtgtacggatagctggagcgtcccttgcgcgcatcacacgggctcaggcgtgccattgtctgcacaatggttggcggaagagagaaggataatcgttcgcatttgaaatcgcaaacggtccgggacggcgctggattacagcgcattacaacgtgaagcagcgggacggatcacttgtccgcggcgctctggttcgctggaagagatgtgcaacgcacaagcaagacggcacatgtaagccaatcaaccatatcacccgaaggggtgaaattacccagtcaagttagttgcctcctgcgccgttaaggcgatgactcacacgcatgcgacaggcgccaccgatgcatgacgccgccggcgtgtcgccgacaagaaaacgcgcagagcgcggaatatggaggagtggaagcaatgctgcacaacctgagcctgaagaagaagctgttattgccgctggtgctgagctggatctgcctgctcggcatcacgctgtggaacgcgtggcagatccgctcgctacgcatggaagagcggcgcctggacctggcccacgtcaccgacaccgcattctcggtggtggccgagtacgaggcgctggccaaggccggcaagctgacgcaggacgaggccaggaatcaggccatcgagcgcgtgcgcgcgatgcgcttcggcagcgatggctatttcacgctgatgcgctcggacaccgtggtattgatgcacccgttcaagccggagatgaacggcaaggccatggaaggcaccaaggaccccaacggcgtctacctcttccgcgaaatcgccgggatcggcaaagggcctggcaagggcttcgtcgagtacctgtggcccaagcccggcgcggatgcgccgcagcccaagctgagctacgtggccaacttccgcccgtgggactggaacttcatcgcgggcctgtacctggacgacatcgaggcggcgttccgcgccgaactgatgaaggcgttcggcatcctgctgggggttggcttgctgatgtcgctggtgatggtgcgcgtggcggccagcctgcagcgccagctgggcggcgaacctgccaccacggcgcacatcgccgggcgcattgccgaaggcgacctcggcagccaggtagaggtgcgccccggcgacgagcacagcgtcctctatgcgatgcatcgcatgcaggcgcgcctgaccggcgcaatcggcagcatccgcggctcggccgattcgatcgcgggcgcggccaagcagatcgccgcgggcaacgccgacctgtcgcgccgcagcgaagaacaggccgcgtcgctgcaggaaaccgccgccagcatggagcagctcaccagcaccgtgcgccagagcgccgagaacgcgcgccaggccagccacctggccgaaggcgcatcggacatcgcggtgcgcggcggcaccatcgtcagccaggtggtggacaccatgggcgagatcaagaatgcctcgggcaaggtggtcgacatcatcggcgtgatcgagggcattgccttccagaccaacatcctcgcgctcaatgcggccgtggaagcggcacgtgccggcgaccagggccgcggcttcgcggtggtggccggcgaggtgcgcacgctggcgcagcgcagcgccaccgctgcaaaggagatcaaggcgctgatcggcaactcggcgcagcgcgtggatgacggcgcggtgctggttgaaagcgcgggcaaggcgatggacgagatcgtcggcgcggtcaagcgcgtgaccgacctgatggccgagatgcgcgcggctaccgaggagcagaccggcggcatcgagcaggtcaaccaggcggtgtcgcagatggaccagatggcgcagcagaacgccgcgctggtggaagaagccgcggccgccgccgcctcgctggaagaccaggccgatgcgctgcatcacgcggtcggccagttccggctggcgcaggcctgacggcagcgcctgcgcttgtcacttgagcgtcatacgcaccagactgctgcgtgtatcatgaagcgcaaccggccgccccttgcggccggcatggactcagaccactaccgggagagcgcatcatgatggcattcattggcaccgtgttcgttggccttatcgtcggcctgatcgccagggcggtcaaacccggcgacgacaagatgggctggatcatgaccatcgtcctgggcgtgctgggctcgctggctgcaggctacgtcggccgcgccatgggctggtacctgccgggccagccggccggctggattgcgtcggtgattggcgcgatcgtgctgctggtgatctacggcatggtccggcgcaagggctgactggcgcggcgcacgccggcggcgtcctgcgcgtcggccagggccggtacctcgggcgcggcaggcgcctgcggtaccgcggcagtattgggcgtgccgctgcgcgccggcccctggaggctctggaggccctgggccagcgtggcgccaggcacggcgtcggccggcgtggccatggcgggcacgcgcggcgtacgcaggccgggcgcggcatcatggcaacgcagcagcgggcggtcgccacccggcgccatcgccgacacctgcggcgcgaccgcccgcaggacccgcaccgccagcgcgctggtaaagctgtagcgcgccgcatagggttctctcacattgaccactacggtgccgaagaagcgctcgcccagcgtgaacacaaaggtggccgagcggttcaccgagcgcgacgaaatcagccgcccgcccggcccatagacctggtagcgctggtcgccggtgccggtcttgcccgccaccgccagcgtggcgccgtcgcgcccgggcaccgtgaaggcgccgcggatcgacctggcggtgccgcgctccaccacatccagcatcgagcgccgcgccagttcggccacttcggccggcaatacccgcttgcccggacccggctgcagcacgtagcgcgtggcgtacggcgtgccgtcggcaaacgccaggctgcgcaccgccgtgttctgcgtgactacgccgcccgccagcaggatgccggccagctccgccagcgcggccggccggtcgcccgcggcaccgatggcgctgccgtacgacggcgtcagggaatcgaacggatagcccagccgctgccagcgccgcgcaatccgcgtgaaggcgtcttgctccagcagcgtgcggatgcggttgtcctggccggccttgctgcgcgtgcggaacagccatttgtacacttcctggcgctcggcggtgctggccttcaggatctctgccagcgtcgcgtcggggtgctggtcgaggtactccaccatccacagttccagcggatgcacccgtgacaggtagccccggtcgttcaggttgaacttgtccttgccgtacttgcggtacagcgcgctcaggtcttcgccggccagctgcttgtcgcccaggcgggcgcgcatgatgcggatgtagctgtcctcgtccaggtgcggccgcgcgctcagcagcgtcaccgacatgcgcaccgcattcaggtgcggcgtagtcatgcgcacgcggcccagcagcgtggccaggcgcagctcagaactcttgccgcggtagcgctggtagaagttcgtcatgtaggcgctgccctcctggtcggcaaagcgctccaggtaggcgcgccggccgggcgcgtcgcggtcatcgaagagctcgccaatgtccgggctggcgtggaaggtctcgtagcgcacgatgtcgcgcatcatgcggatgaagaccaggttgaccgagtgctggaatgcggtccgcaccgtcaggttgcgcatgcccgattcacgctcgaaattgctgaagctctgcaggccgccgccggtgtagaaggcttcgccggcgccgccggagtacttgcgctccatggcggcatcgagcatggccatcagctcgcgctccgcgggcttgcgcgccttaagcaagtaatcgaccgcccagtggctgagcgcgtcctggcgtgccagcggcaccgcggccagctgtgcgctggtcatgccggcatagcgcgcgtgcagctcgctgatgatctccaggtaggtcaccagcgtgcgcagcttggccgtggaacccaggttcaggcgcgcgccgctgttgatatcaaagggctggtcgatattgtcggcctggatccgcaccacgctggcattgcccacgcgctcatacagcgtgaagctcgtcatcagtttcgacgggtcgtcgtggtcgcgcagcaggttgtggccgtacaggcccatggcgcgcgcatcggccttgttgttcacgcgctgcagcgtttcggtgacgatgcgctgcgcctcgcggttgacggtgctgtccacggtcaggtcgagccggtccatgtcgtagcggctctccaccccggtgagccgggtgatatcggcacgcacccggttgacggccttgcgcgtgacaaagggctcctgcggcgggctctggggtggcgcggccttgtccagcggctgcgccagcgctacgtcgcgcagctcggcggtgatgacgttgttggccgccagcaggcgcaggtagctgccggtcagcgcatccaggttggtgtcatcgcggcgcaggtggtaggacgggcggcgctgcgagatgatcagcgacagtgcgcgcttgaaggcctgcgcctggcgcggctcgggcgcgtgctggtccagttccttgagcagccggttgacctcgccgaagtcctcgccataccagacccagagcccatcgccgatgccgttgatctcgccgaagccggcgcgcgccgacagcggcaccgtgttcaggtagtcgaccacgatgcgctcgcgcgcgcgctgggtgtcggggccgtccaggtaggcacgcagcgacgccgacgccatctggcggaatttctccgggatcgatgcggtgcgcccttcgggcgagtgccggtatttctcgatctgcgtggccagcgtgctgccgccgggcgcgtcatgcgacttgtcggcaagccggatcacctggtcgagcaccgcgcgcgacagccggcgccagtccagcgccgggttcatattggggtattccgggttgagcaggccctggttctcgacatagagcaaggcgctcaccagcagcggcggcaccgtgccgaagtccgggtactggcgctgcggataacgctcgaacgccagcgtcagcccgttgcagtcgcgcagcagcaggcccgcctggttcttctcgcggtagggcgtgaacaggccttcgtcgatcagccgcaccatctcgggcgacatgcgcgcctgttcggcgggaacgtagccgcgctgctccagccgctgcgcgaacagcggcacctggccgtagcccatgcgggcgtcatagggcccggaatgcgggaaacggatgctgtcgctggcgcccggcaggatctcgaatgtcagccgctgccccaggctgccgatcagccgcgcctgcaagtgcgagttgtgcacttcgcttgcgacaaagctgtacacaacataggcgcccccaccaagggcgaccgccaagccagcgaagatccagccacgacgcgacacgtttgggcttccctgttgggccgatgcagcgcgcaggggctgtcatgcaccggctcgaagcgcaatgttctcgcggcgcgcgcacgccgcgcgccgcctgtcttgatattagtaggagtaaaggcagcctgcagcaagcgcacgcgcgggcattgtgccgttgcatacaggcatcactccaggcagcgcctgagccacattgcgcccctgtccgaaacggtcatcaggctgcctgcgcgcgtgccacgggccgccccccgaacggatagcccgggtcgttgtagccgtgcgtcgaggcatggcccggcgacaccagcgcatcgaccatcgattcttcctcgggcgtgatgacggcagcgggcgcgcccaggtagtcctcgaattgcgcgagcgtgcgcggaccggcaatgaccgacgagataatcgggttggccagcacccacgccgtggcgaactggcccggggtcagcccgcgcccttcggcatgggccttgagctgctgtgcaatcagcagcgactcttcacggaactcggtttccatcatgcggcggtctgcgcggccggcgcgcgtaccctcgcccggtgcctgcccgggcgcgtacttgccggtcagcacgccgcgcgccaccgggctgtagggcaccacgcccagcccgtagtgctcgcatgccggcaggatctccacctccggcatccggttcagcaggttgtaatagggctggcatgccaccgggcgcggcacgcccagctcgccgcacagccgtgcgatctccgcgatgcgccagccgcggaagttcgacaccgcccagtagcggatcttgccgctgcgcaccaggtcgcccattgcccgcaccgcctcttccaggttcgcgccgggataatcgcggtgcagatagagaatgtcgatgtagtccgtcgccagccggtgcaggctgtcctccaccgcgcgcaggatccaggtccgcgaatagtgcccgtgattgggcgccgcctgcatcgcgttgcccagcttggtggcaagtacccagtcgtggcggctggcggtcagcaggcgcccgaccatctgctccgacgcgcccttggtatacacgtcggcggtgtcgatgaagttcacgccgtggtcgcgcgcgctggcgacgatgcgggcggcttcggccgcatcggtctggtcggcgaacatcatggtgcccaggcaaagtgccgaaacgcgcaggttgctggcgccgaggcggcggtagggcatggtggtggcgggcatggtggctccttgggtggggtgggatggcgtcgggttggtgaaagcacagggcacaggcggaaacggcagactgtgaccacggttccacattttgccgcgagtcggcgtggcttgctggccccctgccggtttccgtgcggcccatcggggatccagcccgggagaattggtttcaatatgttgcaggccggccaacgggagccaatttgcagtcatattctcgcgtttgccgcggaggatgacgctttgcgctaccctcgcggcgttcatgcaagagaagaaaagagtcgaaccttatgaaaacggaaaccacggatgtcgtcatcatcggcgcagggcccgcgggctcggtcgcggccggcttgctgcgcaagcatgggattccggtgctggtgatcgagaaggagacgttcccgcgcttttccatcggcgaaagcctgctgccgcagagcatggcctacatcgaagaggcaggcatgctgcgcgcggtggtggaagcgggcttccagtacaagaacggcgccgccttcgcgcgcggcgaccagcagaccgcctttgactttcgcgagaagttctcgcccggctggggcaccacctaccaggtgcagcgcgcgcgctttgacgacgtgctgatccgcgaggcggcgcgccagggcgccgaggtgcgcttctcgcacctggtcgaggacgtcgacgtcagcggcgcgcagccggaggtgaccgtgcgtgcgccggacggcagccggtacagcgtgcgcgcgaagttcctgctcgatgcctccggctttggccgcatcctgccgcgcctgctgcagctggaatcgccgtcgggcttcccggtgcgcagcgcgctcttcacccacgtggaagaccgcatcgcgccgggcgccttcgatcgcaacaagatcctgatcagcgtgcatccgcaacaccctgacgtctggtactggaccatcccgttctcggacggccgctgctcgcagggcgtggttgccgagaaggcattcctggaccgctacacgggcaccgagaccgaacggctgcgggcgctggtggccgaggaacccggcctggcaaagctgcttggcaacgcgcagtgggacacccccgcgcgccagatcgccggctattcggccaatgtgaagtccctgtggggcaacggctatgcgctgctcggcaatgccggggagttcctggacccggtgttctcgtccggcgtgaccatcgccttcaagtcggccagcctggcggcgcaatgcctggtgcgccagcttgccggcgacaccgtggactgggagcaggacttcgcccagccgctcaaggccggcgtggactgcttccgcgtgtttgtcgaagcctggtacgagggccgcttccagcaactgatcttccatcccaatgccaactccgagatccgcgacatgatctcgtcgatcctggccggctacgcgtgggaccgcagcaaccccttcgtggccgagccgcgccgccggctggcggtgctggaagaattctgccgcgtatgatgcgccgcatctgcacgcgttccgcgttcgcgcctgcgcccgcagaggacttttttcaaggacacctggtatgaccaatccgaccgtactggttacgggatcgtcgcgcggcatcggtcgcgccatcgccctgcggctggcccgcgacggctatgacgtggtggtgcattgccgctcgcgccgcgacgaagccgactccgtcgccgacgcggtgcgcgcttgcggccgcaaggcccgcgtgttgtgcttcgacgtggcccggcgcgaggaagccgctgccgcgctgctggccgatatcgccgcacatgactgctactacggcgtggtgtgcaacgccggcctggcgcgcgacgcggccttcccggccatgagcggcgccgaatgggacgaggtggtgcacaccaacctcgacgccttctacaacgtgctcaacccggtggtgatgccgatggtgcagcgacgccagcccgggcgcatcgtcacgctgtcgtcggtctcgggcctggtgggcaaccgcggccagaccaactacagcgcggccaaggccggcatcatcggcgccaccaaggcgctggcaatcgaacttgccaaacgcgccatcacagtcaactgcgtggcgcccggcctgatcgacaccgacatggtcgagcagcacgtgcgcgacgaggcgctgcgcatgatcccggcgcggcggctcggcacgcccgacgaagtggccgcgaccgtggccttcctgatgtcgcccgacgctggctatatcacgcgccaggtgatctcggtcaacgggggcatgttcggatgaagcgcgtcgtcgccagcgtgaccccatgaacggggtcagcatcttcttcctgcaggcgatgctggtggtcgccctgccctatctgctatggcgtggtgccggcctgcgctcggtgtttccgctggttggtgtgcaggtgctggccggcatcgtgctggggccgtcggtgttcgggcaactggcgccgcagggctggaccgcgctgttcggccctgatcgcctgccgatgctgtccggcctgcagtggctggcggtgacgctgttctgcttcctgaccggcctgcacctgcgcgaagacagcgtgcccgcgcactggcgcgcgaccctgcagatctcgctgggcagcattgcggcgccgttcgcgctgggggccgctgccggctggtggatgaccacggccggctggccggtcgcgggggaactggccagcccctactggtttgcctgcgccatgggcatctgcaccgccgtcacggcgctgccggtgctgggtgcgctgctgcgcgagatgcgcctgaccggcacccgcctgggccagctggccttgcgctgcgcggccgtcaacgatgcctgggtgtggctgttcctgaccctggtgctgctgcagcatggcggccaggacggcgccagcggcctcatcgtggcggcccgcgccggtgcttacctggcgttcatgttcctggcagtgcgccccgcgctggcatggctgctgcgccgccgcgcgccggagaccgagctgctgctggcgatggcgctgttcctggtgctggcgtcggcattcctgggggagttggccgggctgcaccatgtgatgggcggcttcgtcgccggactggtatggcccgcacgcgaagcgcagcgtgtgcgccagcagctcgaaccggtcacggtggtggtgctgctgcccttctttttcctggccgccggactgcgcaccgagatctcgctggataatccgatgacactgtggatcgcgttgctgtcgctggtcatcgcgatcaccggcaagatggccggcgtcgcgctgcccgcgcgccgcgccggcatgggctggcacgaatcgctggcactgggcacgctactgcagaccaagggcctggtcgaggtggtggtgctgaccgtgctgctggacgcgcgcatcatcagcaccgcggcgttttccggactgttgctgatggcgctggccagcacgctgctggcgcggccgttgacgatgctggtagcgcggggccggttgcattaagcgccatccggccgctcacaccggagtcaatcccggcaaccctgcaatcgcctgcgccaggtagtccagcaaaagccgcacccgctccggctggtagcgccgcgacggatagaccaggaaggcttcctgcgccggaccgctccagcgtggcaacacgcgctgcagggcgccgctgtcgagcaggtcctgcaccagccatgccggcgtcatgccaaagccggcgccggccaggaagctttcgcgcatcgccagcgagttgttgacgcggtagcggcaggacgcgctcaccggcgcctgcccgccgggcccgtcgagcacgatctcgtcgccggcggccagccaggtgaagcgcaggatctggtgccgcgccaggtcggccggctgccggatgcgcgcatggcgtgcgaggtagtcgggcgaggctaccagcagccgcggcgacaccgcgatgcggcgcgcgaccacattgggcggcagcgaggcgccgaggcgcaccgcgatgtcgacgccctcctccaccaggtcgacgaagcggtcgtcgaacagcaactccacctctacctccggatagcgctgctggaacgccagcaccagcgcattgagccgcagcacgccgaagctggccggcgcgctgacacgcacccgcccggccggctgcccggacatgccacgcgcatcgctgaccgcctcgccgtattcatccagcacgcggcgcgcgcgctcatggaagcgccgccccgcctcggtcggcgacaggctggtggtgctgcgctccagcagccgcacgcccatctctttctccagcgcagccacgaccttgctgatggtcggctgggtcgactgctgctcgcgcgccaccgccgacaggctgcccagctccacggcgcgcacgaagacctgcattgccctgatggtgtccatgccgttccttgtgtgcccactcattccatcatggcatgagcgatatgccattctgcccgctacctgtcatttctggaatgccctacctttggcgccatcccggcaccaacgccggtccacgaaccgaggcaaaccatgttccgcattccccgcatcctgcgccgcctgactgcgctgacgttgtccgccaccatcgccagcaccgcggcgctggccagccccttgcaagacccggcctggctgaccagctggatggcaagccagcagccggtgtggcagcccggcgcccagccgctgccgaccggcgtgcccgcggtgctgtccggccagacgctgcgccaggtggtacggctcagcgtgggcggcaagcgcgtgcgcgtggtgctgtccaacccctacggccgccacccggtcgcggtcggcgcggcgcaactcgcgcgccatgccggcggtggcagtaccgatgcggcgggcagcagcgcggtgacgttccgcggcagcgcgtcggtgatcctcccggctggccagtccgtggcaagcgatccggtcgtcttcgactcccccgtactgggcgaactggcactcagcctctacctgccgcaaccgacagcgatcgagtcgttccattgggatgggcgccagaccgcgtggctcgtggccggcaatgcgaccaggcaggccacgctgcctgcgccgcagtcgttcagcgcacgcatcctgctcagcgaggtgcaggtcgatgcgcccgggcatgccggcgccgtggtggccatcggcgattcgatcaccgagggcaacggctcaacccccgacaccaaccgccgctggcccgacgtgctggcacagcgtgctgccggcaacggcgtggctgtgctcaatgccggcatctccggcggccggctgctgcgcgatggcatgggggagtccgcgctggcgcggctggatcgcgacgtactgagccagccgcatgtgcgcaccgtgatcgcggcgatcggcatcaacgatatcgcctggccaggctccacctttgcaccgggcgatgcggtgccgcaggccgccgagctgatcgagggctaccgccgcctgatcgcgcgcgcccatgcgcgcggcgtgcgcgtgatcggcgccaccatcacgccgtttgcgggggcgctgcgcgatacgccgatccgcggctatgacagcccgggcaaggaagcggtgcggctggcggtcaacgactggatccgcaacggcggcgcgttcgatggggtggtggacttcgacgccgcggtgcgcgatcccgcgcgcccgcaggcgctgctgccggcgttcgacagcggcgaccacctgcatcccggcgacgcgggctatcgcgccatggcggcgcagatcgatgcggcgctgcctgagcttggccgtcagtcccggtccggcgcacccggtggaaagagcgggcggtaaggccgcgcctcgtccaccgcgcgcgcgaacgatggccgcgccagcagccggttgcgataagcgcgcacattgccgcgcgcatcggggatgggatgcacccagtccgcgtagaacagcgatggcgcggcagcgcaatcggccagagtgaaggcgccgcccgcggcccattcccggccggccagcgttggctcgagccaggcgtaggccgagtcaagcagcttgcgcgcctcggccacgccataggcatcgcggtgctccgccgggcgcaggtagtcggccacgatgcgttgcatcggcgtcatcacgtactggtcgaagaagcggtcgagcatgcgcacttccagcgcggcgtcgggcgaatccggcagccagcgcaccgggccgcggtgatgctggtccaggtagtcgatgatgatgctggactcgaacaccgtgcggctgccatcgaccagcaccggcatgcgcctgagcggccacagcctggcgagttcgtccatgttctgcgcgtgttcaggcgacagcatccggaattcgaaggggatggcgttctcgtacagcgcaaccaggaccttctggcaataggacgaaaacgggtgggcgtatagctccatcgtggtctccggtggtgatcttcggtggtggtcggcgcgcgactactgctgcgccgcaaagcgatcggtcgcggcaatcagctggtccatgatgcccggctcggtccacgcatggccggcgccttcgatcaggtggaaatcggccgcgggccacgcctggtgcagcgcataggcatagcgcaccgggcacggcatgtcatagcggccgtgcacgatcacgccggggatgtcggccagcttgtgcgcgtcgcgcagcagctgcccgtcttccagccagcagcggtgcgtgaaatagtggttctccagccgcgcgaacgccagcgcgaagtgcccgtcgtcatgcttggcgctgttgccggcgtctggcagcagcgtgatggtctcgccttcccaaacgctccatgcgcgtgccgcttccacctgcttgtcctggtcgtcaccagtcagcagcttgcggtacgcggccatcatgttgccgcgctcggcctcgggcaccggcgcctggaaacgcgcccatttgtcggggaacatctcggacacgccgtattggtagtaccagtccagctcggcctgcgacaccgtgtagatgccacgcagcaccagctcgctgacgcgctgcgggtgcttctgcgcataggccagcgccagcgtcgagccccatgagccgccgaacaccagccagcgctccacgccggccagatcgcgcaggcgctcgatatcgtcgaccaggtgccaggtggtgttggcctccagccccgcatgcggcgtcgaacgcccgcagccgcgctggtcgaacagcagcacgtcatagcgcgccggatcgaacagccgccggtggtccgcagagatcccgccaccgggcccgccgtgcaggaacaccgccggcttggcgccgggcgtgcccacacgctcgtagtagatgacatgcccgtcgccgacatccagcgtgccggtttcatagggctcgatttcgggatagagggtgcgcaaggccggcatggatatgggtctacggagatcgggagccacagtgtacgccggagggaacgtcaaacagtagcccgccccttaaccggcgaacaccgccttcacccagtccctcagcaaccgcgtggcgggacgctccgcggcgcgctcgctgtagacaaggtcatagcggaaactctccagcgtaagcccgaagggctgcaccagcacgcccgaggccagctcttcggcgaccagcgtcaggctgagcaggccgactccctgtcccgcaatggtggcctgcacggcgtggatctcgtcggtaaagctgaggcccgcctgtggatcggtgacctcgacgccggcgtgcgccagccactggtgccataccggcgcgcgctcgtcatcgcgcgcgccggcgccccattcgaagtgcaccagcgtggcgtgcttcaggtcttgcacgctggccagcttcaggccggggctgcagaccggcgcaaaccggtcgcagaacaacggctcgaccaccaggccgggatagctgccgctgccgtagcggatggcagcgtccgcatcgtggtccaggtcgacgacctggtccgacgcatccaggcgcagcgtccagtcagggtaggccgtgcggaactggccggcgcgcggtgccagccgcctggccatgaaggcaaccgtcgacgtcagcgtggcaacgttggcctgtgcgctgcgctgcaccgccagcacggcgcgctccatcccgtccaggccgtcccgcaccgcgggaaacaactgatgcccggcgggcgtcaggcgcaccttgcgggtctggcgctcgaacagcttcacgccaaggctctcttccagcaaccggatctggtggctgaccgccgtcggcgtgacgtgcagttcgtccgccgcgtgcttgaagctggcgcgccgggcggcggcttcaaaggtgcgcagggcacccagtggcggcagtttgcgcaagcctcccccttagatgagatgtattcatgtgtcgactgaaaagcgaccatttgtcgcggcctgatctccgctccgatacttgacctatctgatcggccacccaggcgaccaggtgaattctactaaatcatctaccggagtcagcaatgctactggaacaagtccacacccaacccgacccttatgctccctatctgctttcgcaagccatccgggccggcggcttcctctttgtctccggccaggccggggtcggcgacgatggcgccatcgtgggccgtgacgacttcgatgcccaggccgagcaggcgttcagcaacctcaggcgcgcgctgcaggcgggcggctcggggctggaccgcgtggtgaaggtgacgatcttcctgacctcgatggcacacttcccgaagatcgtcgcactgcgccgcaagtggttctctgccccctatccggccgacaccatcgtcgaggtctcggcgctctactcgccggacgcgaagatcgagatcgaagccatcgccctggccgcagaagctgcgcgatgaccacgcccgccgcgccctcactgttcgatacgctggccctgaacggcgtgccgctgcgcaaccggctcgcggtggcgccgatgacgcgcatcagcgccaccgccgcaggcgttcccaccgaggccatgacgcgctactacgcaggctttgcccgcggcggctttggcctcatcgtcacggagggtatctataccgaccgtgcctatacccagggctatgccggccagcccggtttgacggatgcgcagcaagtggccgcgtggcgccaggtggttgccgcggtccaccagcagggcgggcgcatcgtggcccagctgatgcacgccggtgcgctgtcgcaggccaaccgcttccgcgaccacacggtcgggccctcggcggtgcagcccaaggggctgcaaatgaccgtgtatgccggcaagggtccataccggatgccgcgcgccatggaagaggcggacatcctgcaggccatcgaaggctttgcgcaggccgcccggctggcccgtgacgcgggtttcgacggcgttgaaatccacggtgccaatggctatctgctggatcagttcctgacgagctatacgaatcaacgccaggacgcctggggcggcagcatcgcacagcgcatgcgcctgccgctggaaaccgtccgcgcggtgcgcgttgccgtgggagctggcttccccgtcggcgtgcgcatctcgcaaggcaaggtcaatgatttcgtccacaagtggccggaaggcgcggaaggcgcggccgccgttttctccgcgctcgcggcaagcagcgtggactacctccacgtgacggagcacgaagcatggcagcccgccttcgcggacgacggcgcgacgctggtgcagcttgcacgccgtgccgcgcccgggctcacgatcatggccaacggcagcctgcatgagccatcgcgcgcggccagcctgctggacgatggcgcgacgctggtcgcgctcggacgcggcgcccttgcgaatccggactggccggtgctggtgcgcgagggacagccggtgcggccgttcgatgcggccgtcctcgcgccgctgggcaatatcaaggatgccgagcaggcgctgcgcgaagcacgcgcgacggtgacgccaggctgacggcatcgcccgcgctagcgttgcgcgtgatccctgcgccagctggccggcgccatcccgaactgcgcagaaaaccaccgggtaaaggagctggccgacccataccccagcaactgcgacacccgcagcagcgaatagcgcgggttctccacgtaccgtcgcgccagttcacgccgcacgtcgttcaggatctcagtaaaggtctcgcccgcgtcgtcgagctggcgctgcatggtgcgcaggctcaggcccaggccctccgccacggcctcgcaggtggcgcggcccattggcagcatcaggtagatggcggcgcgcacttcatggccgatggactgcgggttggcgcgcggcagcgtgtcgatgaactgctgtgcgtagcgtgccatgaccggatccgccgtcgggttcggcgcgtcgaggtcggccgcgcggcagatgatgccattgcagtccgcgttgaactccagcgggcaaccgaacaggcggcgatggatgcgcaggtcggccggcggcgcatgcgtgaagctcacgccgatcggctgccagcgcggacccagcagcagcgcgcacatgcggaagacgacgccgatggccagctcggtggcctgccgcgagggcgcgtcgctgagcacttcctgccggatgaccacggcgctgccggcatcctcgagcaacagcgccaccgagtcattgaccaggtgccggtagcggatggtggtggcaagcgcggcgcgcagcgtgggctgctggctgatcaagaggctcatcacgccaaagtccgacagctggcgcgactccgccatgcgcagcccgaaggtcgggcaggccgaggcctgcgcggcggcttccagcagcgccacgcaggcgctgagcgggacgcgctggtcgggatcgtccagccaggcccgccgcagtcgcgcctggcgcagcaacggctgcggatccaggccgaggtcgcgcgaaacctcgaggaagttggttagtgcggcagcacgtatcagggtttccaagccagcgttgccttgcgatgagatgtcagtcgggggcgcggtctgcccgccgcagcagcgatcatagggccgcatggcatgaaatgcaaagtcatcgggagccaatgcaaagccggccggggcagcaatctctacagttccctgcagctgcagcgtgttctgcaccaaccagactccaggagacaagaccatggcaaacgttgtccgcatgtacgagaccggcggccccgaagtgcttcgctatgaacacatggaagtgggcgatccgggccccggacaggtccgcatccgccacgtcgcagtgggactgaactacgccgacacctacttccgcaatggcacctatcccgtgccgctgcccagcggcatgggcgtggaagccgccggcgtggtggtatccgtcggcccgggcgtgaccaacgtggcggcgggcgaccgcgtcacctacaccggcttcgtcaacacgctgggcgcctacagcaccgagcgcctggtaccggccgcgccgctgatccgcctgcccgagagcattgccttcgaaaccgccgcggccatgaccatgcgcgggctgacctcggcctacctgatgcgccgcatctatccgttcagccagggcgacaccatcctgctgcacgccgcggcgggcggggtcgggctgatcgtgtcgcagtgggccaagctgctgggcctgacggtgatcggcacggtgtccaccgaagccaaggccgaagtggcgcgtgcgcacggctgcgaccacatcatccagtacacccgcgaagacgtagccaagcgcgtgcgcgagctgaccgacggcgtgggggtctcggtggtattcgacagcgtcggcaagaccaccttcatggcgtcgctggattcgctcaagcggcgcggcaccatggtgtgcgtgggcaccgcatcgggcccgattccgccgttcgaccccgtgctgctggcgatgaagggatcgctgttcctgacgcgcccggcgctggccgactacatcgccgaccctgcggagaagcaagcgctggcgggcgagctgttcgaccacgtgggcgcgggccgcatccgcatcggcatcaaccagcgctatgcgctggaagacgcggtccaggcgcaccaggacctggaggcgcgccgtaccaccggctcgtcgatcttcgtcatctgagaacaacaacagaggagaccacaccatgcatgcagaacccctgacctgcaccattggcgccgaactgagcggcgtcagcctggccgatgcatcacgcgacgccggcctgttcaccgagatcaaggcgctgctgctgcagcacaaggtgctgttcctgcgcgaccaggacatcacccgcgccgaacacgttgcctttgcccgccgcttcggcgaactggaagaccacccggtggtaggcagcgacccggagcacccgggcctggtgcagatctacaagtcgcccgacagcaaggtcgagcactacgagaactcgttccattgcgacgccacctggcgccaggcgccgccgatgggctgcgtgctgcgctgcgtggaaacgccggcagtgggcggcgacaccatctgggtgaacatgggcgaggcgtaccgccgcctgccgcaggacatcaaggcccgcatcgaaggcctgcgcgccaagcacagcatcgaacacaccttcggcgccaatatgccgccggagaagcgtgccgcgctggcggcgcagttcccgatggtggagcatcccgtggtgcgcacccacccggagacgggcgagaaggtcctgttcgtcaacgccttcacctcgcactttgccaactaccaccgcgacgacgtggtccgcttcggcaaggatttcatgcccggcgccggcgatctgctgcactacctgtgcgcgcaggcggagatcccggagtaccaggtgcgctggcgctggaagaagaacagcgtggcgatctgggacaaccgctgcacccagcattacgcagtgcaggactatgcgcccacggtgcgcaaaatggagcgcgccggcatcatcggcgacgtgccgttctgacggaggcagacatgcaaccaaaccttgtgcctgcggcgccgcaggcttatgcctatcccttgctcgtcaggcaactgctgctcaattcgctgtcgctctacggcgaccagcagatcacgtaccgcgggcaactgcgccatagctatcgcgacttccaccggcgtgtcggccggctggcttcagcgctggcggcgcagggggtggcgcacggcaccaccgtggcggtgatggactgggacagccaccgctacctggaatgctatttcggcgtgccgatgatgggcgcgacgctgttcacggtcaacgtgcggctgtcggcgcagcaaatcctgtacacgctgaacgattccggcgccgaggtggtgctgctccatcccgacttcctgccggtgatggaagagatccgcggccagctgaccagcgtgcgcagctttgtcctgctggccgacggccagcacgtgccgccgacatctctgccgttctgcggcgagtacgagacgctgctgagcgcggcctcgcccgacttcgacttccccgagttcgacgagaacacccgcgccgccaccttctacacgacgggcaccaccggcgatcccaagggcgtgtgctacagccatcgcgatatcgtgctgcatgcgctggcctcggccaccagcctgtgcgcgccgcgcgaaggacagcgcctgcatcgggaagacgtctacatgccgatcacgccgatgttccacgtgctcgcctggggcatcccgtatgtcgcggtcatgctcgggctgcgcatcgtgctgccggggcgctatgcgccggacatgctgctgcagttgcgcgagaccgagcgggtcacgttctcgcactgcgtgccgaccttgctgcagatgctgttgcaggcggcgcaggcaagcggccaggacttgtcgggctggaagctcatcatcggcggctcggcgctgccgccggcgttgtgcgaggctgccctcgagcgcggcatggatgtgtttgccggctatggcatgtcggagaccggccccatcgtcgcgctggcacagttgccgccaggcgacgcacatcgcgaccatgagaccgaagtgcgcatgcgctgctcgacggggcggccggtggcgatggtggacttccgcctggtggatgaatcgatgcacgaggtgccgcgcgacggccaggcgcgcggcgagatcgtgctgcgcgcaccgttcctgaccagggcataccatggcaagcccgaggcatcggccgagctgtgggccggcggctacctgcatacgcaggacatcgcggtaatgggggccgacggcttcgtgcagatcgtcgaccggatcaaggacgtgatcaagaccggcggcgaatgggtctcgtcgatcgaggtcgagagcctggtcacgcaggtgccgggcgtgcaggagtgcgcggtcatcggcgtgccggacgccaggtggggcgagcggccgatggcattcgtggtgcgcaagcctggcacaacggtgaccgcggatacgattcgtacgtcgctgctggcgcgcgtcgaggccaaccggctcagcaaatatgcggtgccggaatccgagcggatcctgtttgtcgacgagatcccgaagaccagcgtcggcaagatcgacaagaagcgcttgcgcagcaccggcgcctgagccggcagcaggaagaagaaagggcagcctcggatgaggctgcccttttgcgttgccgggaactgactcagggctggatattgaacgccttgacgatgccggcattgcgctcgaactccgtgcgcactgattcgctcagttgcggcaggggctgcgccggcagcggctcataaccgagcgcctccatgcggtcacgcaccttggcagaagccgcggccttgtaggcagccgcgtggaccttctcggccagttcgggcgacagcttcgacgacgcaatcacgcccacccagttgctgaactccatgtcggggtaacccatttccgcaaaggttggcacctgcggcagcagcgccgagcggctcttcgacgccacggcatagacctgcaccttgccggcacggatcatcggcagcgaggtcaccatgccgtcgtacatcacggcaatctgattgcccatcacctgcgtcagcgccggcgcggaaccggcaaagggcacatgctgcaagtccagcccggccttctggttcatgatcatgcccgcgtagtgcgaagcggtgccggcgctgtacgaagcaaagctgagcttgcccggattggcccgggcgtagctgaccaggcccttcaggtccttggccggcaggccaggcgcgccaatcatcaccatgcgcgaacgcgccacggcggcgacgggcctgacgtctttcagcgggtcgaacggctgcttgagcacatgcgggatctcggtcagcacattgctggcggtgaccatgatggtctggccatcagcgggcgcggccagcatggtagtgatggcaatgccgccgccggcgcccggcttgttgtcgaccaccacggggtggccaaggtcggccgacagctggtctgccagcaggcgcgcgagcacgtccatggtgccgcccgcgggggcgggcaccagcatccggaccggcttgctggtccaggccatggcagcgggagccgccagcgccaggccggccgccacggcggcgatacgcagcaggaatgaagggtgggtgggcatgttgtctccgttatgtagtatggatcttctgtccagcattgccgggcgcggcgtcaccgggcggtgagcgcgatgcctggcgggggtggggaagcgggagacgcgcgggccagcgcccgcagcattgcctccagcaaggcacgcggcggcctggcgccagcgatcggcggcgcaccgttgatcacaaagcgcggcacgcccaggccgggattgggtagcggcacatcctcgccatgcagcggcggcagccatgccaggtcttgcacagtggccggtgccgccgcttgcggcatcggcatgccggaggcgatcgccgcggcgtgcagcacgcgtggatcgccgaggtcctcgccgcgcaggaagtactcttcaaacaatcggtcgatcagcacggatgcggccgcctcgccaccagcctggcgcgcataccggatcaggcgatgcgcaagcacggtgttgggcagcacttcgatgcggtcaagttccagcgtgatgccggcctcgcgcgccgcggcgcatacctgcgcctgccgcagcgccacggcttcggcgctgccaagccgcgccaggctgaacttgcgataggggatgccggcaggcggcagcgtcggaaacaggagagagctgcgccattcgaccgtgaccgctacatcgggccgttgctgggccagctgcgccagcgccgtttcaagatggcgcttgccgatcatgcaccaggggcagaccaggtcgaacccgacctggatgaagagggagacaggctggttcatggcagagcgcccgtagcggcacgctgcccgcggcgggccggcgccgccgccagcacttgcgcacgctccgcctcgctcatctgcgcccagcgcccgatttccagccgtgtcctggcgcagccctggcaatagcggttggcgaggtccatgcggcagatgttgatgcagggattggcgagggcgtcagggtgatgcatcacgaactccggtagtgcatggcaagggccggccggtatgccggccctgtggccagggtcaggccgccgcgcgcagcggcaggttcttctgccccgccttgcggttgggcgccatgccattggcttccagcgtggcgtcggcgctgtcgtaccaggtgccgatgcggtagatctcgcgggcttccttgcccgatgcgatctcgcggcccagttcatgcgccacgcgcacgcactgctcgatctgctgcaccgaggtcatgcggttgccgtgctggtcgatgatggtgtcttcgatgccgcagcgcgggtgcaggcccatcgccatcgccatcatgttgaacggcagcacgttcttcagcagcgactcggcggtcagcgtgcagccgtccggcgcgcggtgcacgaagttgaagaagttgaacgggttggggccgtcgaagccgccgccgatgccgatccaggtcaggttcagcgggccggtgtagacgccggcgcgcaccagccgctccagcgtttccagcgcgtgcatgccggtcagctggaaatgcggctggatgcccgaggcctgcagccggcgcaggtgctcttccacccagcccgggccggccggcacggtcatttcgcgataggcggcctggtaggccgggtgttccagcgaggtgcccttcaggtattccggatagagcaactccatgatgttcatctgcgtggtgttgatcgccacggtcacctggtcgggcttgggctccagctccgccagcatgtggcgggtgtcgtcggacagccacttggccgcctggccgtcgtcttccggcgcaaacgagatcgagccgcccacctggatgatcatgtccggcaccgcggcgcgcacgccggcgatcagctcgttgaacttggacaagcgcttggagcccttgccgtccagttcgcgcacgtgcaggtgcagcaccgtggcgccggcgttgtagcagtccacggctttctggacctgctcttccatggtgacggggatgtcttcgggaaagtcctgcggcatccattccgggccatagggcgcaacggtgatcaccaccttgtccatgttttcggggtgcagggaatcgtcaaggaattgcatggatggctccggttggttagtggttggagtatcggtgaacgaccggccgcgatttgacgattggggacatccgatttacatttcgggacactcagggaaagcacggaatccgcccaatgtcctactatctgcgcagcgccagcctgaccaattacgtggaagtcgcgcgttcgctggggctcgatccgtaccagcaactgagggcggcaaagatcaaccgctcggtcctgctcgatcccgatatccgcatccccgcggcctcggtcggccgcttgctggatgcgtcggcacacgccaccggggccgacgatttcggcctgcgcatggccgagctgcgcgagttctccaacctcggcccgctcgccttcgtggtgcgtgaagagcccacgctgcgccgcgcgctggagtcgatggtccgctacatgggcctgcagaatgaatcgctgtcgatgcgtatcgaagacagcgatgaactggtgatgatccggctgcaggtgctcaccgaagcgccgggcaccttgcggcaggccgccgacctcgcggtcggcgtggtgttccggatgctgaggctgttcctggggcagtcctggcggccgcgcagcatctgcttcacccaccccgcgccggccaacgcggccacgttttcacgcgtgttcggcatgccctgcaccttcaaccaggatttcgacggcatcgtctgcctggcctcggacctggaggcgccgttgccgtcgtatgacccggtgatggcgcagcaggtgaagcactatctcggcacgctgctggcgcagtcgaccgcggcgaccatgtcggacatggtgcgcaagctggtctatgcgctgctgcccaccggactgtgctcggtcgaacgcgtggcccagcacctgagcgtcgaccggcgcaccgtgcatcggcggctcgggcaggaacatacgacctactccgacatccttgccgaggcccgtgccgacctggtaatccgctacctggagaaccgcgagcgtccgctgtcggaagtggccgcgctgctggggttttcgtcgctgagcgcgttctcgcggtggttcagcgggcgttttgggcgcagcgtgtcggcatggcgggcgcaggcggggtaatagaggaaaggttctttgcgaatttgagggtggtggctgttggcgggtgtggttgattgggctgtcgctacgcggtcggttgtcgttcttgactagcgtggctgtttcgccggcgtagccggcgacctacttcttgtccaagcgacaagaagtaggcaagaagcgcgtcgcctatgcggctggcaatcaattacgcggcgtcggtcatatgggcggcggtgcttgccgtttggatgtgatcgcggttcgaccctgctacgccatgtgagtcagggacagtgcctgcgataaccggcttttgaacgatccccaagtcgggcggtggcccgcgctctcgagcgatatcgcatcaacgccttcggctgcgctccgcgcaagcgcccaatgaccgtcaacgcattttgagcctgcgcagcagccgtaggcgtccccgcgatgcggctggcagcaggcggcctacgctttttgtcgctcggacaaaaagtgactcgccggctaagccggcgaaacagccacgtatgccaagaacgacaaccgaccgcatggcaacaatccaactgcagccaactcaaaacttgtgccgcatccccaaagccacgccaaccatgctgcgctgcccgttggccgccgcatagctgttgcccaacgacaggctgttggcatagaccgtggccagcgactccagcatcagcccggcattgcgagcataggccgtagacaggtacacatccgtgcgccgcgagaacgcatagttggcaacaaaagcaagctgccacggattggcgacctgcgtattgccgaacaggctcctgacattgtcatagttgtactccagcgtcagccccacggcgggggtgacctggtagttggcgccgatccagtaatagtcatcgcgctggatcaccacgtcagcggcattcttgttctgaccccagcgatagccccccatgatcttggccggaccgaaggcatagctcgccgccacgaccgccttgcgcacggtgccattgctggtgccgatggtggggttccactggtcatagccaatagtggcgccgaacggcccggtgccatatgccagcgaggccccgtaggcggtgtcacgccggaactgtccgggcacttcgccattgccgccgatcggcgtggcaatgccaaccgtttgcggcagcgccagcccggcgccgaacgaccagtgcgcgcgcgccgtcagcgggccgaactggccggtgtacttgaccgtgttgtcctcgcggaaattggcgcccgcctgcagcaccaccggttcatattgcgtggcgtaggcagtaggcgagaagttcgccagcgcttcaaagatcgacgtgtactggcggcccaggctgagctggccgatgccggcgcgctgcagcgcgacaaaggcctggcggccgaacaggcggccgctctgctgcatggtgccgctgtccaggctgaagccgctttccagcacgaacgacgcctgccatcccgcaccaagatcttccgcgccgcgcaggccccagcgcgacccggacagcccgcccgaggccatgcggaacaccttgtcgcctggccccgggttgaagccgttggtggcaaccggcacagcgccgacgcggttcacgtactcgacattgacgtccgccacgccatacagcgtgaccgacgattgcgcggcggccgccagcggacagcccagcatcagggccatgacggtgcttctggttttcatttttctcctccttgattgcccggcctttgcggccggattcttttgttgtgccgcggatgcggcgaggtcacgaatcgcgcgtgaccagggtgcccagttccgccagcaagtcatgggcacgcggccacgggccgtagcccgcggcagggttgaggtggccgacgttgcccaggtccaccagccggccgccccatgcggcggccatctccgcgacgcgcgcatggctggccaaagggtcgttgccgctggcagcaaccaaagttgggaacggcaggggcgcgagcggcgtcggcagccagcccccctgcaccagcgcgtccggcgccggatagccgggcggcagcggctgcgcgaaatccggcggcgtcaccagcagcgcgcccaggatctggcgctggtgccgtgccgcccagtgcacggtgatcatcacgccggcgctgtgcgcgaccagcacgaccggcttgtcgatgtccgccagttccgcatcgagtgcagcgacgcgagccgcgcagctgagcttgtcgtgctccagcggcggcacgcagcggacgtcgtgcccctgcgcctgcagttcggcttgcagcagcgtttgccagtgctcggcgacgtggtcgcgcaggcccggcaccatcaggacagtgtgggtggtagcagtcatggtcggattggaaagagtcaggcaggaataacgtgaggcacagcgtggccatccaggcggcgcaggtccgccgcgtaatgccggcgaccgaggcagaacagcagggccgcggccgcaccggccagcggaatccattgcagcgcgccggtcaggccgatgtggtcggccagcacgccggtcaggaacgggcctggtgccagccccagcaggttgttgatcagggtcagcgtggcaaacgcggtcgcatggatggcaggccgcgtcaggttggccaccatcgcactggcggggccggcggtgccgcccaccaccagcatgcccgcgccgatcagcaccagctgcgcgtggcccgcgggcagccggaacgccgtcatcagcaagacgcagcaaatcacgctgtaggcgatggccatctgccatttgcgcgcgggcacgcgccgcgccacgcggtcggtcagcgcaccgcaggccaccatgcctacgccggccatcagcaccagcattgccgcggccacgccggcgcgcccggtcgccatgccgtagtcgcgcgacaggaagctgggcagccagcccagcagcgccgccatcaccagcagctgcagcgcacttcccgcgcaggcgcagagcatggaaggcaccgtcagcagctcgcgtacgatccggcgcggctccagttgccgggccgaggccgcggcgtcgccgttggccgcgcccacgcgttgctggagcccgcgcagccgatgctcgctgatcgtcaggtagtagagcgccaccatcaccaggccgaagccggcgatcccggcaaaggcgatgcgccagccaaaatgggccgacagaacgccgcccagccccatgccaagcaccgagccgaacgcgccgccggcaatgaatgccgcgctgaggctggcgcgcagatggcgcgggaacaccgacaccaccaccgcgatacccacgctgccataggccgcctcgccgatgccgacgcaaagccgcgccaggaacatctggccgaagctgtccgccaccgcgcagcccagcgtggccaggctccacagcgccgccatcaggatcaggctgcgcacgcgtccccagcggtcggccagcagcgacagcggaatcgcgagcacgcccaccatcagcgccaccacgccgccgagcgcgcccagctctgtatcaccgagctgccattcggccttcagcagcggaaacaccgcgttgagcacctggcgcgacatatagtccgacagcagcagcgcgaacgtcagcgcaaagacgagccacgcatagcgcgctccggcaacagccggcagggccggcgtggccggctctgcggcaagggcaaggcgaggtctggacatgggcgtctccggaagcagaccggcggtcttcgcgccgccgtgcgttcacagcccgcccccgaagggcgacgagcgcaagcagtatctggcgatcgggaccgcgcggtttgatattccgggacgtacgtttgacattccgggacagctggggaaaacgccgagacgaaaaaaaaccggcacccgaaggtgccggtttctggctggcccgccgtcaggcgaggcgcggcgacgctcagtcttccagcttcggcagcgaggcactgaccttggtcgacagcaggccgctcttggcatacgtctgcagcttctcgcgcgtgtcgacgatatccagcgtgcgcatggtcagctggccgatacggtccagcggcgtgaacatcgactcgcccttttccatggtcagccgttccggcttgtaggtcagattgggcgaggtggtgttcaggatcgagtagtcgttgccgcggcgcaattcgatggtgacttcgccggtgatggcgccggccacccagcgctgggcggtttcgcgcagcatgatggcttgcgggtcgaaccagcggccctggtacagcaggcggccaaggcggcggccgttgtcgcggtactgctcgatggtgtcttcgttgtggatgccggtgatcaggcgctcgtaggcgatgaacagcagcgccaggcccggggcttcgtagatgccgcggctcttggcttcgatgatgcggttctcgatctggtcgctcatgcccaggccatggcgcccgccgatgcggttggcttccatgaacaggtcgacgctgttggcgaaggtctggccgttcagcgcgaccggctggccttcctcgaagcgcacggtgacttcctcgcgcttgacttccacgtcatcgcgccagaactgcacgcccatgatcggctgcacgatgcggatgcccgaatccaggtgctccaggtccttggcctcgtgggtggcgcccagcatgttggagtcggtcgagtacgccttttcggccgacatcttgtaatcgaagccgttctggcgcatgaactccgacatctcggcgcggccgcccagttcgtcgatgaactgctggtccagccacggcttgtagatctgcaggccggggttggtcaggagaccgtagcggtagaagcgttcaatgtcattgcccttgaacgtgctgccatcgccccagatattgacgccatcttccttcatcgcagcaaccagcatggtgccggtgacggcgcggccgatcggggtggtgttgaagtaggtgatgccggcggtcgagatatggaacgcgccgcactgcatggcggcgatgccttcggccaccagttgcgtgcggcagtcgaccaggcgggcttcctcggcgccgtaggccttggcgcggcgcgggatgtcctcgtagtcgggctcgtcgggctggcccaggttggcggtgtaggcgtaggggacagcgcccttctggcgcatccagaggagtgccgcgctggtgtcaaggccgccggagaaggcgattccgacgcgctggccggaaggaatgtgctgcaggatggtagtcatcgccagaaaatctaagtgaatttgtcggctcttgggcgggcttccaatacgcgcgccggggcggcgggaagcacggcgacgcggccggccgagtcacgcgccgcgtcagtgccaaacgcgaattgtgacacggcagcgcccacgcgccaaacgcggggactggcgggggcgccggcgccacctgcatccgggcccgccggaccattcaaatcccgcgaacgcgcctttcaaaactctcgactggttcgcgccaggacccctccctatactccgccgcactgttgtctgaaagcggagtcgtcatgctgcatcgtgccctggaaggagtccgggtcctggacctgtcgcgcatcctggccggtccctggtgtacccagaacctggccgacctgggcgccgaggtaaccaaggtcgagcacccggagcgcggcgacgatacccgcggctggggcccgccctacctggaagcgcccgagggcagcggcgacacccggcgcctgtccggctacttcatctgctgcaaccgcggcaagcgctcggtcgcgatcgactacggcacgcccgagggcgcggcgcaggtacgtgagctggcgcgcgaggccgacgtgctggtcgagaactacaaggtcggcacgctgcgccgctacgggctggactacgacacgctcaaggcgctcaacccgcgcctggtctacctgtcgatcaccggcttcggccagagcgggccgatggcggacaaacccggctacgactatgtattccagggcatgggcgggctgatgagctacaccggccagcccgacggcacgcccggcgccgggccgctgcgcaccggcgtcgccgtggtcgacctgagcaccggcatgtatgccacctccgcagtcctggccgcgctgtaccagcgccaggcgaccgggctcggtgcgcacctggatatcgcgctgctcgatgtcgcggtggcgatgaacgccaaccaggctgccaactacctggtgtcgggccagaacccgcagcgcagcggcaacgctcatcccaactgcgcgccctatgaggtgttccgctgcgccgacggccacctgatcctggcgatcggcaatgacagccagtttgcgcgcttctgcgccgttgccggcatgccggatcttgcgcaggacccgcgctatgccaccaattccgcgcgcatcgaacacctgcccgcgctgcgcgccctgctgaccgatctcttccccacgcgcacccgcgctgcgtggaccgatgccttcgatgcggccggcgtgccctgggggccgatccacaccatggccgaagtcttcgcccacccgcaggtccagcaccgcgggctgatgcagatggccgaacaccccgtcatgggccgcgtacccatggtgcgcaacccgatgctggccgggcacgacctgccgctgccaccgccgccgctgctgggcgaacacagcccggcgggctgaacggcgcgcagctacccacgagaccaaaaacaccgacacggagacaccgatgaaaccgaccttcaccgccatcgcgctgctggcggcatgcgcaagcggcgccgcacatgcaagcgcgtatcccgaccggccgatcaagctgatcgtcccctacgccgccggcggcaccaccgacatcattgcccgcatcgtcggcacgcgcctgggcccggtgctggggcaaccggtggtggtcgagaaccgcccgggcgccggcggcgcggtcggcagcgcctacgcggccaggcagccggccgacggctacacgctggtgatggaggtggagagctcgcacgccgtcaaccccaacgtctacctgaagaccgcctatgacccggtcaaggacttcgcgccggtcagcaacctggccgacgtgcccaacgtgctggtggtcaacccggcgttcccggccacggacctgcagtcgttcatcaagctgctgaaggccaacccgggcaagtactcgttcggctcgtccggcaacggcggactgagccatatgaacggcgagctgttcatgaacgccaccggcacgcgcatgctgcacgtgccatacaagggcctgggcccggcgctcaacgatgcggtggcaggccagatccaggtggtgttcgacaatatcccgtcgtcgtccggcctgatccagggcgggcgcctgaagccgctggcggtcgccgcgcagcagcgcctgaaggtgctgcccaatgtgccgacctatgccgaggccggcctgccggcgatgaacaacccgtcgtggttcggcctgggcgcaccggcgggcacgccctcggccattctcgacaagctcaacgacgccgtgcgccaggtattggccgagcccgaggtgatcgccgccatcgagaaacaaggtgcgatcccggcaccgagttcgcgcaaggccttcggcgacctgatccgggcgcagaatgcgcactggaagcaagtcgtcgaggacatccatttcaccaggctccagtaagccacaaggaacgacatgagcgcacttcagcaagaaccgcacgccggcgtcgagatcgacgcgcgcggcatcgccaccgtcaccatccgcgaggcgggctcgctcaatatcctgagcacgccggtgatcgcatcgctcacgcgcgccatcgaagcgctggccggcaatgacgcggtacgcgtgctggtgctgcgcggcgccggcgagaaaggctttgtcggcggtgccgacatcaaggaaatggccgcactggaccgcgccagcgccgaggccttcatcagcggcctgcgccgcctgtgcgacgccgtgcgccacctgccggtgccggtgatcgcgcgcatgccgggctggtgcctgggcggcgggctggaactggcgctggcgtgcgatatccgcatcgccgccgacaacgcgcagctgggcatgccggaagtgaaggtcggcatcccgtcggtgatccacgccgcgctgatgccgcgcctgatcggcaatgcgcgcacggcgtggatgctgctgacgggcgagatcaccgatgccgccgaggcgctgcaatgggggctggtgagccgcgtggtgccgctggcggagctggacctggaaatcgaacgcgtggccgcgctgctggccggcttcggcccggtcgcggtgcgccagcagaagcgcctgctgcgcgagtgggaagatgcgccgctggaagtctcgatcaacaacagcgtgaccgagttcggcagcgccttcgacaccggcgagccacagcagcacatggccaccttcctgaaccgcaagcgctgaagcgcggggaaagtgtttacggcgccgtggctgccacggcgccgccttcgcgcgtggccaccacgcgcggatcgttcagcaggaactgcgcaaaggcctcggcaaacgccggcagcttgccgtcggcgcgcacgatcaggttcagttcgcgcagcgcccacggctctgccagccgcacccccaccacgcgcgcctcgcgcagggcctgcgccgccacgctgcgcggtaccagcgccacccccactccggcctcggccagcgacagcaccgcatcgaagctgtgcgcatgcagccgcacgttgggccccttgcccgcgcgctgcgccatgtcgcgcaggaacaggaagttgctgctggtgcggctcatgcagacaaagtcgaaggccagcgccgcgccgaagcgcacttcgggctcgcgcgccagcgggtgatccgcggccaccgcaaggatcagctcgtcgcgcgcgtagcgcaccgagcgcaccccggtggcttcgccgcccgtctggaaatcgcccgccaggatgccgacatcggcttcatgcgccgccaccgccgccaggatcgactggctggcgcgctcctccaggtcgatgttcacatccgggttggccagcaggaagcggctcacgctcgggatgatgaaaccgttgagcgaactgctgttggccagcagccggatattgcccttcagtccggcagaaaagcgtcccacctcgccgtgcatgcgctcgacgccaagcaacagttcgcgcacatggaccagcagggtttcgccggccggcgtcagctccatgccgcgcgcggtacgcacgaacagcggcgtgcccatcgcgtgctccaggttcttcagccggtagctcgccgccgacgcggtgatatgcgtggccgaagcgccacctgacaggctttgcgcatcggcaatggcctggaacaggcgcaggtcggtcagttcgtaacgcaaggcaactccgtttggggcaggacggtcgaaaggattggcgcttggtggtgtcgcggccattctagtgcagcaccgtggacttcccgcccgccctccagcctgcacacactccgcccatttaatgtggacgtcgtccattttctttgctaaggtattgtggacggcgtacacaaaagcatgcgccagttgccagcgcgccgcctgattcgcgcgccatgccgatatccacggccgcccgagcggcggcctacctacaggagttgtcatgcaagtccagccctatctgttcttcgaaggccgttgcgatgaagccgttgagttctataagaagattctcggcgccaaggtcaacatgcggatgacgttcaaggacaacccggaggccggcaagggcggcgagggttgccagcccggcgccggcaccgaagacaaggtcatgcacatggagttccagatcggcgacagcgtgatcatggcctccgacggccgctgctcgaaccagcccgacttccatggcttcgccctgtcgatcaactatcctgacaaggccgcggtcgaaaaggccttcaacggcctgaaggaaggcggccaggtagtgatgccgctggacaagactttctttgccgaccagttcggcatggtcaccgaccgcttcggcatcatgtggatgctgctgtcggcaccgaagtaagccgcgcatcgcgcaggtttcccggcagcgacgcgccccttgagcataagggcttacaatgcgccgcctgccggagaaaccacgccatggacgatcgcatcaacgaactcgaaatcaagctcgccttccaggaagacctgcttgataccctgaacagcaccgtggcgcgccagcagcatcagatcgacctgctgcaggagcagttccgcgcgctgtaccagcaggtgcgcagcgccgccaccaccgcggccgaagccgatccccagcaggaaatcccgccgcactactgatcgacgcggcccgcgccatgcaggccgatcgccgatgtgacggaacgccatcccgcccgcgcggtctgacaggctggctccatccaccgccgccctcgacaggcgcgccccatccgccacatgcgtctgaaactttccctgctgattgccgccgcctgcgtcgctggtgcctcctcggcgctggccggctacaacatctggaccggcgagtactccctctcccggcaggaactgcagaccgcgctggaccagcgcttccccgccacgctgcgctacgccgaagtcgtcagcgtgcagctcagccatccccggctggtgctggacgaggccaacaaccgcgtcaccacccatgtcgacgcacgcctgaccaacgccttgctgccctccccgccggtagacggcaagctcgcgctgaacagcggcgtgcgctacgacccggccaaacgcgcggtgctgctcgacaacccgaccgtacagcaggtggaagtcgccggcatggggcaataccgcgaacagctcaacgccatcggcgctgtggttgcgcagcaattgctgaaggactatccggtctatacgttcaaacccgaagaactgcgcgtcggcggcaaggacgtggagccgggggcgattaccgtgggcaaggatgaggtgcgggtggaggtgaagcagcggtaggcatagcctgcgggccaggctcgctccttcttcctctacctcaaccccggccacctctgaacaccacccccaaccccgccagcaccgcccccatccccgccatcgccagcggcgccatgcggttgcccagcagcaggtagtcgagcaccgccgtgcccgccggcaccaggtagaacaggctggtgacgttgaccaggttgcccgcgcggatcaggcggtagaacagcagcgtcgcgccgatcgaaatgaccagcgccagccacaacagcggcgcagcaaaagccagcgaagcatcgaaggcgaagggctggaaaggcaggcacagcaggcaggccgcgaggctcacgccgtattgcagcggcagcacttctgcgggtgcgcgcgtgatgcgcttctgcaggatggcgccgacggtcgtgctggcgagcgaggccagcgcgcacagcacgcctgccagcgacagcctggccagcagcaggctgtccgccaccaccatggacagcccggcgagcgcgagggccaggcccgccatgcgagcggcgctgaagcgccgctcggtcagcagcagcgtcagcatcggctgggcaccaagcacggtggcgagcacgccgggtgtcatgccgtggtcgagtgcaaggaagtaaaagacggagtagccgccgatcagcagcaagccggtcagggcggtgtaccgccactcgccgcgcggcggcagcaggcggtgcctggccaggccgatcgcgcccagcacggcgcagaccagcgcgaagcgcagcgtcagcaaggcgaagggcgtggcgtggtctagggccagccgggcggcgatggcgccgctgctccacagcagcacgaagaggggcgtggcccaggcggaagtgttggtggtgcgtgtgccggtggcggcgtcgaaatgcgccgggcagtctttgtcggttgtcatggatgtcatctgtcgtcagcttggcaggctccagcgacgcgcatgcggccatggcacagcggcagcgcgcacaggcgtgcggctgccgtgcgcacagggacacggatgcgggactaccggagacgaatgaggctggggggcgtgcccgtcagccgcgcggcggcggcggcgggtgcgcaccgccgatgcacggcggcggcgcgacagatgtgaacgcaggctggcgacgcacgcatggcaacgcgcggcccgggggcgcggcgttgacggggcgttggcggtctgcggtcatggcgggaattgaagacttcgaagatgtggtctggcgatgctatgccagtgcggccatcgcgtcaacgcgattctgttgtgcgctgctccagccgggacaccagcgcctgcagcgtcggcgcgcatccggcttccaccttcagcgccagcatcgcgtccgcccgcgtggtgcccaggttgagcgcggccacgggcttgcccatctgtccggcccagacgcagaagcggtagccggaatagaccatcagcgacgaaccgaccacgagcatggcatccgctgcttccagcgccgcgcgggcggcatctacccgcgggcgcggcacggattcgccgaagaacaccacgtccggcttgaggatgccgccgcagcgcccgcactcgggcacgcggaactgcgcgaacagcggcgattcgaaatgcacgtcgccatcggcggcgggctcggcgatcacgtcgcgcagcgcggcgttctgtgccagcagccagtcctgcaggccggcgcggtcatggcgcgtgccacagtccaggcagatggcgctggccaggctgccatgcagttcgatcacaccctcgctgccggcgcgctggtgcaggccgtcgacattctgcgtgaccagcgccgtgagccggccgtgcgcgccaaggcgcgacagcgcatggtgcgcggcattgggccgcgcctgccacgccaccggccagcccagcatgctgcgcgcccagtagcgctggcgccccgcgtgcgagcccaggaaggcctgcagcgtgatcggctgcgagcgctgccactggccgcgcgcgtcacggtagccgggaatgccggaatcggtgctgatacccgcgccggtcagcacgaacaggcgcgggtggcgctgcacgaaatcgaacagcgcggacgtcgggtgcgggagttgcagcggctcgctcaatttgccggatcctcggcatgacgcgccgcctggcgcgcttcccaggcgcgcagctcctcgcggtagcggtccatttcctggtagtagtagtcgaagatgcagggatcgcagccggagccgcagcactcgtcatcgccgggccgctctggcggcaccgggcgggggtcgtcgggggacacggcaggggacgcttgggacactgacagttcgcgaacaggcgcgttggcggatcaaccgccagtatattcccgccggccccggcctgccgccggacccctcagtggctgagcagcccttcgccgaccgggatcaccagcgccgtgcccgccaggcaggcgatgtcgtcctcggcaagccggcgcgacaccacgctggccagcctggcgccgatgcgggcaagttcggcggcgtcggccaggtagacggcgtcgatcacgctctggtcgaactgcagggccgcgctcaggcggcagcgtccgggcgagccggccggctcggcctgccagctgacctgcacctgattgccgtcgctgcggtggtattcggccgacatcggaaacagccggcaggtatgctcgcgggcccactcgaccagggcagtcatggcgattcccctttggcgggacagcgcgtccgccggtacgccgcgtcagcggctcagtacatggtagagccagtcgtgcgcgcgtgccggcacgcccagcgcgctggcatcgatgcgccgcccctgcacccgcagtgtgccttcgtgcagggcatcaaccgctgcctgggcatccgggaacctccccatcacgccattgcccagcatcagcatccagtccttctcgcggggaatgagcgtgagctgtcccgctgcggtctggcaaaagaaataaccgtacatgcaacccccaagcacctcgcctgtgtccatcttagagcagggcaccatggggccgcgtgccgatctgcacgcttccgaacggcgtgatgaattgtttttgcacggccgcgagggggcggccagaatgccgcattttgcccgaagatagccggacctccccgcccggctgatgccgggccgggctactgccgcccgttgcggccgacagcgaaccccacggtgccatgaaggcagcctcattccattgcttgcacaaactgctcgtgccggcggtcctggcactggctgcgggctcggtcctggccgctgagccggcatccatgccaacggcctcgggcatcgagccgcccgcagaccaggccgcggcagccacgccgcaggtggccgcgggcgcgcgcccccgcatctgcctggtgctctcgggcggcggcgcgcgcggcgcggcccatatcggcgtgctcaaggtgctggaggcgatgcgcatcccggtcgactgcatcgcaggcaccagcatgggttcgctggtggggggcgcctatgccaccggcatggctcccgccgaaatggagcggctggtcggcggcctgagcaccgacaggatcttcaaggaacgcccgccgcgccaggacctgaccatccggcgcaagcaggacgatttcaccaacctgttcacgcccgagatcggagtgcaggccagcggcctcttgctgcccaagggcgcggtctcgggcgtgcagttggagaccgtgctgcgccagctggccaaagtgcccggctaccgggacttcgaccagtttccgattccctaccgcgctgtcgccacggacctggtggcaggcacgccggtggtgttcagccagggcgagctggccaacgtgatgcgcgccagcatgtcggtgccgggcgcggtggcgccggccgagtacgaggggcggctgctggtcgacggcggcctgaccgacaacctgccggtggacgtggcgcgcaggatgggcgccgatatcgtgatcgcggtgaacctgggcacgccgctgatgaggcgtgaggaactgacctcgatcatcggcgtgaccggccagatgctcaatatcctgaccgagcagaacgtgcgtgcgtcgctggcctcgctgcggcccaccgacgtgctgatcgagccggcgctgggcgatttttccgcgaccgacttcgaccatctgccggcaactatccccatcggcgaggctgccgcgcgcaaggtcgccgaccgcctcgcgccgctggcgctgccgccggcgcaatatgcacaactgcgcgccaggcaacaggcggtgcagccgcctgacacccgcccggtcgatgagatccggctggcgccgctgcagcgcgtcaacccggactacgccaccgcggtgatggaaaccaagcccgggcagccggtcgaccaggccacgctggaccaggacatgcgccgcctgttcggcaccggcgacttcgagcacgtcaactacggcatcctggaagagcccggcaagcgcgtgctggcggtcaatgcggtggaaaaatcctacggtcccgactacctgcgcttcgggctcgggctgagctcggatttccgcggcgatgcctacttcaacctggtgggcagctaccggcgcacctggctcaatgcgcttggcgccgaatggcgcaccgatgcgcaggtgggccagacctcgtcgctgatcagtgagttctaccagcctctggatacgcgccagtatttctttatcgcgccgcgcatcgagctggagcggcgcccggtcaatgtcttccagggcagcacgcgcatcgccacctatgacctgcgccgctttgacgtcgcgctggacgcgggcagccagttcaccaagtacggcgagctgcgcgtgggcttgcagaccggcgcggaacacgccacgctgagcaccggcccggagtcgctgtcgccaggcccgggcaatatccggcgcggcgccatcaccgggcggctcatcttcgaccagctcgacagcgtcgacttcccgcgcttcggctatgcggcccggtttcacatctacggctcgcagccggggctgggcgccgaccaggcttatgtcaaggcgcaggcggacggcatctatgcccactcgttcggcgacaacacggtctcgctggccttcaaggtcggcagcaatatcggcggcaagccgttgccgcgctatgacctgttccagtggggcggcttcctgcagcaatccggttatgccaccgggcaactgctgggcggcaacctgcagtttgcgcggctggtctactacaacaagctggcgcgccagaccctgctgcaaggcgtgtacgcaggcttttcgctggaggcgggccgcatgggcgacccgctggtgccggggagcccgaccgggctgctcaagtccggctcggtcttcctggcgctggacagtccgctgggcccgctttacctggcctatggccgcgccgccgcaggcacatacagcttttacctgttcctgggtaaacccttctgagccggtcagcataagcatccagaaaatgtgagccggccgcaccctaccaaagttgtatgtaatgtcttaattcaaatgtctatactttttacgtcaccaagaccccctcttgaatgacgaccttccccggtcgccgctccccagcggcgacattttttttgggcgcccgcctggcatgcggcgcctatgatccgcgcctcgggctgcactggcgggcgctccgcgcctttgctgcaccagcgggcacggcgtgtgcggcctgtcgcggggctcggtgcgctcgctggccgccacggtgaccttcatggcggcgggcttcctgacggtgctggtgcagcgccattggctgggaggctgaccgatgggcacgctcttctcattgctggccgggctggtattcggcatcggcctgatcctgtccggcatggccaacccgaccaaggtgcctggggtttctcgacctggccggggcctgggacccgtcgctcgcctttgtcatggccggcgcgatcctggtgggagtggtggccttcgcactggcgcgccggcgccagcgctcctgggcgttgatgccgtgcagcatccggcccgcgtgccatgcgtgccatgcgtgccatgcgtgccatgcgtgccatgcgggcgatgcgggcgatgcgggcgatgcgcgcatgcagcaaaggctggcccctggcggccagccggtttaagattgcgcgattatcggacaacaagcccagacaacacacctcccaatggacgtcctccgccccctcggtcttggccatgcacaggccgacaccgtccgcgttgcccggccccaggccgacctgctcgccagttttgccggcgatcccaacttcatgctgtcgctggcgcgcgggctgaccgtgctggaggcgttctcggaacgcaagcgcccgctgacgatctcgcaggtggcgcagcgcacgcagctgtcgcgcgcctcggtgcggcgctgcctctatacgctggaacagctcggctacgtcagccagcaggacggccagttcgcgctgcggccgcgcgtgctgcacctgggccacgcgtatttctcgtcgacctcgctggtgtctctggcgcagccgatcctggacaacctgagcgcgcgcatccacgagacctgcacgctggcgatcctggacggcaccgacatcctgtacctggtgcgctccgaagtgcagcgggtgctgaactattcgctaggcatgggcagccgcctgccggcctactgcacctccaacggccggctgctgctggcgcaccagcccgccacggtgctggacggcttcttcgagcacgccgaactgcgcccgcgcacgctgcagaccaaggtctcgcgccaggagctggaagcatgcttcgagcgcgcccgcgaagtggactacgtgatcgtcgatgaggagctggaaccgggcctgcgcgcgatggccgtcccggtgcgctcggcctcgggcatcgtgctggcggggctgagcgtgagcgtgcgcgccgcgcgtgtctctgaaacagagatgatctcgcggctgctgccgccgatacgcgaagccgcggcggcaattggccggctgatcggctcctgattgccgctgactacccgggcagccgcacgggattgaggtaagccgggtccgggttgcgcggcctcggcaccagtgcttcagccccggtgcgccagttccagcgcaaataccagccgctgcaggaagttctccatgcgcccgtccggatggatgaaggcgcagccgaaatggtggatggcgctgtcgtcatggcccaccagccagtggccaaccacctgcaggtccagctcaagcttgcccagttcgcggaagtccagccggcacttgccgaccgtggtgccgaccggcaggtgctctgccgagaccgtcttcgagcgcagccccacgcccgacagcgacaggtcggcgatatcgagccccagcacggtcttgtccgacatgtggatctcgcagcggtagcccctggtcaccagcgtgcgcgcgcggaaatggcggcggcgctggaagtggtagagcttctcggggaattcgacgacgaaggccgggccttcctcatagcgcatggcggccggctggcccaccacaaagttgaccggcacgccgcgcaacagccccgagaacgcattttcatccgaggtcatcagcgacatccgctcgggttccgcgttgcaccagtcgaacacgaaggtgcggtcgaccgggtcgacgtgcaggaccgacgtgacgaactggtgcccggtgcgggtgcgcacgctcagcatgcacttctgccaggacaggtcgcgcagcacggtgccgatctgcgagttgtgcgtcaggcgataacggtcatccgccggctcaatgtcggattcggcgccgttatcggctggcccggaggcatcgtgctgattcatggattcacgcaacatctggagtggctgggatcgccgggtacgggggcttcggcctgccggccgcgcgcatgttaagcgcgtgtcccgatgcccggcaagacgcatgctctcacttcggcagatctgtggcagaacttgagcacagacttccggggggtagcgcgcacggcgctttcaggcgtccgggggtaaaggcggcggcgcagcaagcgttgcctgcgcctcttcgcgcaaccacgccagcagcaccagccggcgcgtgtcgtgttcaaacggcgcgggcgacaacaaatgataggccgttccgtcagcaacgaagccgaacggcgcggccagccggccatcggcgatctcgtcggcggccatcagctgcgaggccatggcccagcccagccccgctgcggcggcctgcaggctgaggtagaaatgttcataccaggcgtcgccgtcgcactgcacggcgggggcggcatcgccgcgcaccgcctgccagcgctgccatgcctcgggccgcgtgcgcgtatgcagccgcgccgggaccgtggctgccccctgcgcaagctgtggccggcacaccggccccacccgttcctgcgctacctcgcgcgcgtgccagcgcgcatcgaaggcaaagtcattgcgccgcagtgccaggtcggcgccgctgcgggtgaagtcgatcggcccgcccgcagccatcaggtgcagcgggatatcgggatggcgcgcggcaaagcgcggcagccgcgggatcagccagcgcatggcgatggtcggctcgcatgacagcaccagcgctcgccccggcggctgcgtgcggatgcgcgcggcggcgccggccagcacctccatcgattgcgtggacgccgcaaacagcgtgcgccccgcctcggtcaggaagaccccgcggttgcgccgctcgaacagcgccacgcccagcgtgtcctcgagctggcggatctgccggctgaccgcgccatgggtcaggtgcagttcctccgccgcccggacaaagctttcgtggcgtgccgcggcctcgaagaatcggatccagcccagccagtgcatcagtcagtttttctcacgtaattgcgcgagtatatatcggttgtgacggcgctttccggcacgcagaattgggtacgcccggatctcccgatgtggcgatctccggataattacaacgtaacctgacagaaaatgcccccaatcgccgaatccctggcggtcgccgccgtgaccgtgctggccgttgtcagtccgggcccggacttcgccatggtgacccgcaacagctacctgtacggccgccgcgccggcctgctcagcgccctcggaatcgcgctgggggtgcaggtgcatgtgctctatacgatgttcggggtggcgctgctgatggctcatgcgcacagcatgctgacggtggtgaagatgctgggggcggcctacctggtgtggatcggcgtccagaccctgcgcaaccgcgaggcgctggcagcagacctgcaaggtgcgcgcacgctgcggccgtgggcggcgctgcgcatgggcttcctgaccaatgcgctgaacccgaagaccacgctgttcgtggtcagcacctacacccaggtggtcggtgcgcacacgccggtgccggtgcaatgggcttatggcggattcatgtcggtggcgcacctggcgtggttcagcctggtggcgtgcgtattcaccgcgccggcgctgcgcgcggcgatgctgcggcgccagcggctgctggaccgcaccatcggctcggccttgtgcgggctgggcgtggcgctggggctcagcaacctggcgtagggccagcctgcgtcagtggccaggcctggcgcacgagatgctggggaccttgcgggccgagccggctttcgaacagcaccagccgctgcacgtgccagggctcgctggccagcgtgcggtgcgtgtcgagccaggcgcgcagcacgctttcgggcactgacggcttgcagcgcgccagcgtcaggtgcggatggaagcgccgccgctctggggtaatgcccgcggccccggccagcgcctgcccgacatcggcgtgcagggcgcgcagcgcgtccaggccgggacctggcgccaggcctgcccacagcaccgaaccctggccgctgcggaagcgcccggtaccggccgcctgaagcaggaaggcaggcgcgcggatgctgtcgagcgcggcctccagcgcggcgccaggcacgttgcactcacccaggaagtgcagggtcaggtggacctgctctggcgctgccggccgcacaccatgcgcgggcggcagggtcgccagcagccttgccgcccgcgcgggcgggacttccacggcaatgaacaggcgcggcatggcagcgcggccagcgccatcagccgggcgtggtgccgacgccttcgcgctgcagcaaggcgcgcttgcgctcgatgccgccggcgtagccggtcagcgcgccggcgctgcccagcacgcgatggcagggcacgatcaccgacagcgggttgcgtcccaccgcgccgccgactgcgcgcgcatgcgtgggcggcaggcccagggtgcgggccagttcgccgtacgacgcggtctcgccgcaggggatggccagcagcgcctcccacacgcgctgctggaacgggctgccggcaaagcgcaccggcacggtgaaggtatcgcggcggccggcgaaatattcggccagttccgacgcggcgccgtcgagcaccgcggcatcggccggcgacacgtcgcggctgtcggcaatgcccgcgggatggtatttctgcccggcgaagaagaggccggtcaggtgtgcgccttgcacgcgcagcaggatggtgccgagcgggctgtcgatatggcgatagctggtcatgtgatcgtctccggttcggccgcggcgctggccgcgtccttcatcgcttcgtagcgatgccacaggtggatggcggcgtaggcacgccacggtgcccattgcgcggtgcgctcgtgcatcgcgcgcacggtactgacgcccagcaccttgcgcagcgcatagtcggtgccggggaacgcatcgggccagcccagcgcgcgcatggcgacatactgcgcggtccagtcgccgatgccgtcgacctcgcgcagcgccgccacggtcagttccggctgcgcgtgcgcatcgagggccagcgtgccgttggccacgcgctgcgccagcgccagcagcgtgcgcgccttgcccgccgacaccccggcatcgcgcaagccttgctctggcagtgtggcaatggcggcggcactcgggaacgtgtagcgcaggccgtccgggggcgtgccgtccagcgcctgtcccgcgtgccgcgccagcgcgcccaggatgcgccgcgcctgcaccaccgagatcacctgccccaccaccgcgcgcaccgcgatctcgaagccatcgacgctgcccggcaggcgcacgcccggcatggcctcggcaagctcgcccaggtgccggtccaccacgtccgggcggcagcccaggtcgcacaggcggcgcaccttgcccagcgcctgcggaatgacgcgcgccagcgaggccgacaacgtcacgcgcagcaccagccggcgcggcacgtgttcgatccgtacccagccggtgtgcgtgctgccgccggcatccaccagcagcgtgcgcatataggtgccgtcccggatcgcctcgatgccatccaccgcgcgggtagccaggaaacgcagccatgcctcccaggcaaacggcgggcggtaacccaggtcgaacaccagccggtcggccacgccgtcggcggcgcggcggcgcagcgccagcggcgtcaggccgtagcgggtcttcagcacatcgttgaagcggcgcacgctgccgaaacccgccgccagcgccacttcggtcaccggcagcgcggtgtcggccagcaagcgcttggccagcagcagccgctgcgtctgcgcgtactcaagcaccgacacgccgaactgcgcatcgaacaggcgccgcaggtgccgctcggtcacgccgatgcgcgccgccagcgtggccacgctgccttcggccatgaagccctcgtcgatcagcgtggccgctgcctgcgccagccggcctgaaatatcggccagcccatgcccgggcgcaagctccggacggcagcgcaggcaggggcggaagccatgcttctccgccgccgcggcgctctcgtagaaggtgcagttttcgcgcttgggcgtgcgtactgcgcacacgggccggcagtacacgccggtcgacgacacgcccacgaagaagcgtccgtcgaagcggcggtcgtgcgaggcgacggccttgtagcaggtgtcgggatcgaggtgcatgacggcatgctaccgctaccggcaaccgcttacccgctggattcggacatttccctctggcgcgcgggcgtgggctgcggcacagttcctggcaggggcggcggctagaatgcgcttcgtgcctcacccgccaacccactgccaccgcccgcccggagacgccatgcgccgcactgccctgcacctgtccttgcttgcttcgcttgcctgcgcgccggcgttggcacagccggtgcagaccgcccccacgacgacgcctgccatggccacgcaggtggcatcggtcgaaggcatcaccgaataccgcctgcccaacggcctgcgcatcgtactggcaccggacgcggccaaggccaccacgaccgtcaacatcacctacctggtcggcagccgccatgagaactacggtgagaccggcatggcccacctgctcgagcacctgctgttcaagggcacgccatcgctgcccggcaagaccatcccgaccgagttcgcccggcgcggcatgagcgtgaacggcaccaccgcgcaggaccgtaccaactacttcggcaccttcagcgccaacgatgaaaacctcgactgggcgctgcgcatggaagccgaccgcatggtcaacagcgtgatctcgcgtgccgacctggacagcgagatgacggtggtgcgcaacgagatggaaatgggcgagaacagccccgggcgcatgctgatgcagcagaccatggccgccgcctaccgctggcacaactacggcaaggccccgatcggcgcgcgcagcgatgtcgagcacgtcagcatcgacggcctgcgcgccttctatcgccgctactaccagcccgacaacgcggtgctggtggtggccggcaagttcgatcccgccgccacgctggcacgcatcgagcgctacttcgggccaatcccgcgcccgacgcgcgtgctgccgcccgagcataccgtcgagcccgcacaggaaggcgcgcgcgaactggtagtgatgcgccccggcgacaacagcctggtcgccgcgcaataccacgtcagcccgggtgcgcatccggacagcacggcactctcgctgctgaccctcatcctcggcgatacgccgggcgggcggctgtacaaggcactggtcgagcgtggccaggccgtgtcggtcggcaccgcgctctatgcgatgaaggacccgggggcgctgctgctcatggtcgagacgtccaaagaccagccgctcgcggctgcgcgcgccgggctgatcacgcaggtcgagggctttgccgaggcgcccgtgaccgaggccgagctggaacgtgcgcgcgtgcgcatgcgcaacgcgtacgagcactacatgaacgatcccggcgcgctcggcgtggcgctgtccgaggccatcgccaagggcgactggcgcctgttcttcctggcgcgcgaccgcatcgagaccaccacgctggcagacgtgcagcgcgtggcgctgaactacctgcaggcctcgaaccgcaccgtgggcgtgttccttcccgccgagcagccgtcgcgcgcgcaggtgccgccggcgcccgatgtcacggccatggtcagcggctaccagggcaggcaggcgatggccgcggtggcggcattcgatcccagccccgccaatatcgaggcccacaccacgcgccagacgctggccaacggcatgcagctggcgttgctgcccaagcctgcgcgcggtgaagtggtgcacggcgcgctggtgctgcgcatcggcgacacgcagagcctgcaggggctgaccacggtgggcgcgctgaccgcctccatgctccgacgcggcgcggctggcatggaccgccagcagatcgccgaccgcatcgaggcgctgcgcgcgcgcgtcggcatctctggcagctctgagcgcgtgaccgtcagcttcgagacgcgccgcgcgcacctgccggaactgctggccctgctgcgcgacctgctgcgcgcaccgaccttccccgaggcggagtttgagacgctgcgcaagaccagcatcgcggagatcgagagcatccggcgcgagccgggcgtgatggcgtctaacgcgctgggccgccatggcgacccctaccccgctggcgacccgcgccatgcgcgcacctttgccgagaacatcgccgacctgcaggccgccaccctggcgcaggtgcgcgacttccacgcgcgcttctatggcgcgggccatgcgcaactgagcctggtgggcgacttcgatgccgcggccgcggccgcgcaggcagcgcagctgttcggcgactggagcgcgcaacagccctacgcgcgcgtcgagcgcccctttgtgccgatcccgccggcggagttcacgctgcccgcgccgggcaaggccaatgccatctacctggcctccacgccgatcgacctgaccaacgacgcgccggactatgcgctgatgatgattgccaaccgcgtgctcggcggcgccagcctgcgcggccgcctggctgaccggctgcggcagcgggaaggcctgagctatggcgcgagcagctgggtgcaggtgggcgcgctcgaccgcgcgggacgcttcggcctgcaggcgcaatacgcaccgcagaacctgccgcgcctgcaacgcgccgtgaccgaggagctggagcgcttcgtgcgcgacggcatcaccgcgcaggaactggccgaggccgtcagcggcctgctgcagcagggcatggtcagccgcagcaacgacgccgcgctggccggcgcgctggccaaccagctctacctgggccgcaccatggccttcaccgccgaactcgaagagcgcctgcgcaacgccacgccggacgccgtcaacgcggccattcggcgttacatgcagccaggcacgctgtcgcgcgtctatgctggcgacttcagcggcgcaccggcgcaggcgggcgcaaccggcagcggaagtggctccggcgcggccggcagcacaggcaacgaagcggccggcgcggcaccgcaggcgcagccctgacatacgcaggaaacaatattcggctgcactggcgaaaggccgcaggcgcggccagcgcaacatcgcagtggcaaggcagggagcgctcggcaggcgtccggtgcaagccccttgccgcgaccccgggttgactgtatattcgtacagtataagtcgatataagaggtgtggatgtcaatcgtgcgagctggcagcaaggcagaagcgctcaggcttctggcctcggaaggtgtgctggcgcttgagctggactacgagacaggatggcaggatgccgtcgaactcggcaggctcggagaaaagcgcggtatcaaggtgcagtatcgcggacaagaaagcatcgccgtccgttcccgcgaagccctgatcgaagggctggccaaacccaaggccacgttccgtcaacgcaatctctattgccagttcgatctcggcacgctggcggaccatgaactgctcgacctcgaggccaaggccacgcggctcggggactatatcctcgccggccacctgctgcgcgatgtcgatggcgtgtggccgcaataagcggcttgcgcgcacgccgggccactagaagagaaaaagccgccatgcaggcggcttccgtcatattgcgctgagcacgttcttcgtgcccgatgccccggtcaatgccacacccgcgtggcgttggcccaacgcgccgcgcacgacgactgcgctacggccgcgtcgatcgtttcgttggcggcctccgccgccggcaccgtcgcggcaacatccagcgcggcgcgccacagcaccgccgacaccagcgtcttgcattgccgccgttcgccatgcgcaagcgcgagcagccgctcatagccgtccagcacgatcagccggtcaccacggcgcggatgcagcgacagcgtgtagaggtggtcagactcgcattgcaggctgccgccgctgaccgcgaccacgattgcacccggcaacgcaatgccgctggcctggacctcgccacgcaagcgcgccaggtacgcgtgcgcgcgtggatcgcaggtgccgcccacaccgcccgccatctctgccggcagcgcgcagagcgccatcagctcggccggcgaaaccgccagcgtataggcctgcagcgtgggacgataggttgccaccacggcgcgcagccggtgcggcgcatcgccatcatgccctgcctgcagcgggctgtccggcccgcgtaactgcatcgtgttcatgtcgactcctgccgcgcggggcgtttacctggtcagtcgcgcagcagttgcttggcgatgatcagctgctggatctgcgtggtgccttcatacaggcgcagcaggcgcacgtcgcggtagaagcgctcggccttgtactcggcgatatagccggcgccgccatggatctgcaccgcgcggtcggccacgcggcccaccatctcggtacagaacatcttggtgcacgaggccagcatgctgacctccggatcgctcttgccggcgggcttggcgtcgtagcgctgggcgcagtcgcgcaccatcgacaggccggcgtagagctcggcctggctgtcggccagcatcgcctggatcagctggaagtcgccgatgggcttgccgaactgcttgcgctccctggcataggccacagcgtcggtgatcaggcgatgcgccatgccgcaggccagcgccgagatatgcaggcggccgcggtcgagcaccttcatcgcggtcttgaagcccacgcccggcacgccgccgatgatattggcggccggcacgcgcacgttctcaagcaccacgtcgcaggtcttggtgccgcgctggcccatcttcttgtccggcttgcccagcgagatgcccggggtgtcggccggcacgatgaaggacgagatgcccgaagcgcccgcgccgccggtgcgcgccatcagcgtgaaggcgccggcgcgcggtgcgttggtgatgaagcgcttggtgccgttgatgacatagtggtcgccatccagctccgccttggtctgcagcgaggccgcgtcggaacccgcattgggctcggtcagcgcgaacgagatgatcagctcgccgctggcgatgcgcggcaggtactgttgcttctgttcctcggtgccatccatcaggatgccttgcgagccgatgccgacgttggtgccgaacaccgagcggaaggcaaaggcggtatggcccaggtcgtagaccacatcgcattcctgcgacatcgacaggccgatgccgccgtagttctcggggatggagatgccgaacaggcccatctccttcatgtccgcgacgatctcggcgggcacgtcgtcggtttcctccagcgtgtcttcggcgggcttcaggcgttcgtcgatgaagcgctgcaccgaggcgcgcagcagggcaaaggattcttggtcaagggccatgatgattctccgggtcaagccagtgcgtcagtctggccgcctatggtacgctggtcgcgggatttgacaatccactgaaacttggacagaagcgtcagtataatttgacaatcgcagccggcctcaacccaatgtggcggataacaggcccgccacgccgatggccagcgccgccagcgcatcgcccgcgatcaggccgccaccgaccagcgatgccgtgctcatatcctgcggcaaaccccgggccggccttgcgggcctggccacggcggcggccacgctcgccaccacgccgccggccgccatccacccggccgccgccaggttgacgaagccgccgaaagatgacgcatagggcgaaggcaggatcaccgcatcgagcaggaaatccgccacccgcccgcgccggctggcttgcgcgaagcgctgccacgcctgccggccgaggatggccttgcgcaataccgcggtagccaggccgagcgcgaggcccgttgccactgccacatgctggccggcacggctttgcgccagcccgtgcagcacgcccacgatcttgtatgtcatggccgaggtccagcgcgccggctgctggtcggccggcaggctggtctggtccagcgccagcaccgggtaggcatgcatgaacagccgtgccatcgccaccgcaaccagcgcacccacgacgatgcccgccacctggtagccgaactgcaccatgcggtcgctgcccaggcgccagccggtggagcggtcctgctgcatgtcgctcgcctcggccgtggccaccagcaagaccgtggcggcgatcagcccgacatggggcgcgcgcagcccggcggcggccatcaggatcacggacagcacgaaggccgacgagatcgggttctggtcgaccatgccgaccgagatgccgttgaccagcgcaaacaccagcaccagcagcacggccatcaactggaaacccaacggctggccgaaccatgccacgcccgccgccaccgtggccgcgccccacagcagcgcccaggccgccacccagcccatgcccggcccgcgccgcggcgcagggtggcggcgcgcgcgccactggcggcacgcctgcgccagcagcaaggccacatcaaccgcagccgcccccatgatcatgcccagggccaccaggaaggtggccttgcgatagggctcgccaggcgccatccagcccgcggcaacaaaccacggggtcatggcccagccggccagcccgcccaccagcgcggcaatgcccacgcgcgcgccgacgatcatcccggcgccgaaggtcgcggccgacaggtccagcgccgccagccacggcatgcgcgcggcgcccaggccgcagcccaggcccagtgccatgccgcccccgagccgcgccaccgaacgccgcagcagcgccggatcggtcagcgcgcgcaggatattggccacggccagccccgacggaaaggtcagctgcatccggtccaccagcaatggcgtgtacagcatgcccacacccaccccgaacatgccgatgcacagcatgtacagcaccagctgccacagcggcggctgcgccatgcccagccacgccatcgcctgcagcaccacggccatgccgcccatgcccgccaccgacgccgccgcggtctggatgtagttggcaccgtggcgcccgggcgcgccatagcccgccgtcaccaccgagccgaggatgcccgccagcacctgcccgccgacgaagaagcccagcgagaaattcatatacgcggcagcgatgccgcccagcgggcccagcaccagcatgcctgccgcgcccagcagcacgtggtactgccagctgcccggcgaaggcagcctggtggcgcggggtgcggcatcggtcgggagcgtgggcatggcgcagcgggcgggctgaagtagtgtgcctcttgcgaagcataggccaaggccggtctgcggcgatgtgcgacttgttcccgactttcgccggatggccgtttcccggccgggttaacactagtttcgtgcgcaaccatctagtcgatatagttgcgcacacaactacatcgcagagacactacgaccccaccatgccagactccaccgcaccccacgccgcagtgccgccggcaccgccgccctcgtcatcgcgcccatggccgcagcgcgtgccggtactgattgccggcggcggcccggtcggcctgacgctggccgcgctgctggcgcgccagggcatagccgcgctggtggtggaagccgacgacggctactgcgccggcagccgggccatctgcatggcgcggcgttcgctggagatcctcggctgggtgggcgcagaccgcgccaccgtcgaaaccggcctgccgtgggtgggcgggcgtagctactaccgcgatgccgaggtgctgcatttccgcatgcccagcgaggccggcgagcgcttcgccccgatggtcaatatccagcagtactacctggaagccttcgcccacgacgccgcgctgcgcggcgctgcgccagcggatgtgcgcttcggcgcgcgcgtgcaggcggtgcgccagcacggcagcggcgtcgtggccgagatccagacaggcgcaggcgtggtgcaggtcggcgcgcaatggctggtggcctgcgacggcgggcgcagcaccgtgcgcgagcaactggggctgcgcatgaagggcacccagtacgaaggccgctacgtgatcgtcgatatcgtgcagaagacgcggcgcgaggtggagcggctggcctggttcgacccgccttccaaccccggatcgaccatcctgatgcaccgccagcctgacgacgtctggcgcatcgactaccagatccgcgacgacgaagaccctgacgaagccgtcaagccggagaacgtgctgccgcgcgtgcagagccacctcgacatgatcggcgagaccgagccgtggcggccgttgtggatctccatctacaacgccaagtgcctgaccttgcaggactaccgccacggccgcgtgctgtttgccggcgacgccgcgcacctggtgccgatctttggcgtgcgcgggctcaactccgggctggacgatgccggcaacctggcctggaagctggcgtgggtgctgcgcggccaggcgcccgaaagcctgctcgattcctattcgaccgaacgcgtgcatgccacgcggcagaacatcgcctacggcgccaagagcaccgagttcatggcaccgcccgactttgccttccggctgatgcgcgaggccacgctgcgtctggcgcagcatgagcccgcggtgcggtcactgatcaatccgcggcagtcggcaccgattgcctatacggattcggcgctgaacggtcccagcgactttggcgacgactgtcctggcgccgcgcccggcctgcccgcgccggaaatgcgcgtggcaggccccgacgaggtcgtgcacctcacgcaatgcttcgggcaacggttcacgttgctgtacttcagcgatgcgcccacgctgcccgagccactggccgcgttcgcgcatgcgcatccggacgccatgcagacacacgtggtggtcaccggcggcaacgtggccggcgccacggcgctggccgacgtcgccggccaggcccacgcccgctacggcgcacgacccggcacgctctacctgatccgccccgatggctatgtcctggcacgctggcgcgaaccgtcatgggacgccgtgcgcgccacccttgcccccctgatgcaaaccggagcccgccatgcaagctgaagacctcgacctcgcctacacccatctgtgcgaggccatgggccgtgccggcgaagcgcgcaccccgctgctattggcaatggtgtgcctgggcctgatgagccggcaggaagcgctggcgccggtgctcgcgctgatcgacgaagccgaggcgcgcagccagaaatagggaacatagggctagaatgccgacgcctgacaaggacacgccatgaagccactgccacgcctcgaccagttcctgacctaccgcctgcaccaggtcaacaagctcagcgacaaggacagcgccgccgcctacctggagcaatgcggcctgccgctcggcgagggccgctgcctggccgcgatcggcgcctttgcgccgctgtcggtcaacgagctggcgcaccgcgccaacctgaccaagggccaggccagccgctcggcgcaggcgctggtggcgcgcgggctggtcagcaaggaggccagcgaggccgacgggcgcggcgtggtgctgtcactgacagcacagggcaagccgctgtaccggcaggcgatcacgatgatcgccaggcgcaatgcagagatcttcggctgcctgagcgacgccgaacgggcgctgctgggcagcctgctcgaccggctggtcgcgcacgccggccagcaggacgaagaaggcgccgaagacgccggcgcctgatccttcagcggcgcaggttgtccacctgcacgcgcgcgccatcgcggcgcgctgcgtcggccacctcattggtgaccacggtctggccgatcggcgccagcgcaatgccggccagcttcaggtgctggatcgcaaacgggatgccgatgatggttacgaagttggcgaccgccgccatcacgtggccgatggccagccacacgccggcaaagacaaaccacagcacattgccgaccagccccagcgcgccggtgccgacatcgtcgcgtccgctcagctcgcgccggctgatggcctgcttgccgaacgggaaaaaggtgaaagtgccgatcacgaagcaggccttgccccaggggatcccgatgatcgagataaaggccagcagcccaaccagccaccaggccaggcccatgaccacgccgccaaggatgaaccagaggaagttgccgattgcgcgcatgtcattctttcgcgagtgaggaagagaacacgcatgatacgcaacggtgtggtgcgggcatggcgccgagcgggtcgtggcagcaaagcgtacccgtttctgcgtgcctcgccgaaaccggcggaacggcatcgccggcccttcgggaaacgcgttcgacccttgtttataggcatattccattctgcaagaccgatcgcaaaccccgctgccgcgggcaaagcgtacccgtttctgcgtgcctccgcgcgtgctgtcgccttcggcaagcccggcgccgcagcgctagaatgtgacgtctgcccgctatccgcgtgacggactccgggtgcatcccacccgctgtcacccttctccgactccatcgcctgctccgctgtcccccatgaagcccacgctgctgatcctgacccaagtcgccacccaccaccgcgacgccattgccgaacgattcgagatcctctacgcgccagacgccgaaggccgcgccgcgcagatcgccacgcagggcgaacgcatccgcgcggtactgaccatcggctccaccggcctgaccgcggcggagatcgacgcgatgccggcactggaactggtgtgcgcactgggcgcgggcttcgagaacatcgccgtggcccacgcccgcgcacgcggcatcgccgtggccaatggcgccggcaccaacgacagctgcgtggccgaccacgccttcgcgctgctgctggcgaccgtgcgcgccgtgccgcagctggacgcggccacgcgcgcaggcacctggcgcactgcactgccgctgcggcccaatgtctctggcaagcggctggggatcgtcgggctgggcaccatcggccggcgtattgcccggcgcggcgaaggcttcgacctggagatcggctatcacaaccgcaagccgcgcgaagatgccgggtaccggtacttcgacagcatcggtgcgctggccgcttgggcggactacctggtgatcgccacgccgggcggggcaggtacgcggcacctggtcgatgcaagcgtgctggcggcgctcgggccggccgggttcctcgtcaatatcgcgcgcggcagcgtggtggataccgaagcgctggcttcagcgctgcgcgctggcaagcttggcggggcggggctggatgtctatgagagcgagccggcgccgccggtggtgttgttcgactgtcctaacgtcgtgctgacgccgcatgtggctggctggtcgccggaggccatcacggcgtccgtgacgcagttcctggagaatgcgcggcggcattttgctggggaggggttgttgacgccggtggactgaggggcaagctcttgcattggacaacggtacgccgacaacagcccaagcagcagctaagatctacccggccccaaacaccaccctcaccctcaaccccggccccgcatcctccagcaccacccgcgccccatgcgactgggcaatctccgccacgatggccagccccagcccgctgccgccggtcggcgcatcggccacccgatagaaccggtcaaacacgcgcgcccgctcctcagcggggatccccggcccgttgtcgctgacaaccagctcaacggcgcgcccatcggcgctgcgacccaccagcacatcgatacggcttccggcagggatataagccagcgcattgtccagcaggttggtcagcaggatgcgcaacgcatccacatctccacgcaccaccaccggcaacgtgtccttgctgccgtccagcccaaggtcgatattgcgatccagcgctgcctgcgccatgtccgcgaccacgcttgcggccagttgatgcagctccaccggttcgtgccggggcatggctgcgcccggctcctgccgtgccagcgtcaaaagctgggtgaccaggtgggtcagccgctccagcccctggcgcagcttgccgatcgcttcgtcacgcgctgcgccgttggcggcgcgctccaccagctgtgcctgcaactgcagcgctgccagcggcgtgcgcagggcgtgcgcggcgtcggcgacgaaggcacgctgggtgtcgatggcgtgcgagagccgcgccagcagctggttcagcgctgcgctcagcggagcgatctcgtccggcatctggcgcacggccagcggcgccagtgtgttggcgtcgcgcgcgcgcacttcggtggcaatttcgcgcagcgggcgcaggccgcgccccactgccatccacaccagccagcccagcagcggcagcagcaacagcagcggcgccacggtgcgcagcgccatgcgcgcggccagggtgcgccgtgcgctcatcggctgcgcgatctgcaccacggtgggcccaagctgcatgctgtataggcgccattcgccctgctgcgtggtcacgttggaaaagcccagttccgcacgcgcgggcagcgccgggtgcgaatgcgacaggtacaggctgcggccggagccgtcccagatgtggatgaccacatcctcgtcggcgtgggtcaggtcgccgggcgagcccaggaaaggcggcgccaccgggtcggcgaactggctgggcaatgccgcggccatctgcttcatctggtagtcgaacagcgcgttggcttcctgccgtgcctgcccgtagatcagcgccgtggcgacggcgatgccggcaagcaggcccgcggccagccaccacagcagggttcgctggatggagcgcatcagggggtgtctccttcgcccacggatgctgcatccccatcgaggcgcggcaccacatagcccacgccgcggatattgcgaatcagcgccgcgccgaacttcttacgcagcgcgtggatatagacctcgacggtattgctgccgacttcatcgtcccagccgtacagccgctcctgcagctgcggcaccgaccagaccttgccgggccgcgccatcagcgcggccagcagcgcgaactcgcgcgccgacaggcgcaccggctcgccgcggtgggtggcctcgcgggtagtggggttgagcacgatgtcgccgtagctgaccagcggttccgcccggccggcggcacggcgcgccagcgcgtgcatgcgcgccgccagttcctgcaggtcaaagggcttgaccaggtaatcatcggcgccggcattgagccccgcgacacgatccgcgacggcatcgcgcgcggtcaggatcagcaccggcgtcggcacgccgcgcgcgcgcaaggtgcgcagcacgtcgaggcccgggcgccgcggcaggccgaggtcgagcaggatcaggtcatagcacgcctggccgtgctgcgcggtgctggccgcggccaggcccgcgtcgccgtcgcgcacccagtcgacggtaaagccttcctggcgcagcgccagcttgacgctgtcgccgatcatggcgtcgtcttccaccagcagcacgcgcatggctatgcgttccggccgcggccgtcgagctgctcggccagtgcgcgcgccagtcccggcagcgcggggtggctggcggtgatgacgtggaccggcacggcctccagccagccgcgcatgcggcccttggcgacaaagcgctcggcgaaggccgaggcctgcagcgcaggcacgaagcgtggcaggatgccgccgcccaggtagaccccgccacgtgcgcccagcaccagggcgatgtcggccgcaaccgagccgagcaggccgaagaacaccgccatggcgcgctggcacagcgggtcgtggcgctcgaaggcgccggtggtgacctgctccggcaacagcggcgcgagcaaaagcgtacccgtttctgcggccagcgcggcatggatatgcgacaggccgctgccgcacaggagcctctccgccgacacccggccaacgttgcgatgggcggcgcgccaggcgatccattcgtcgtcagtgtcgggcatcagctcgatatggccgccttcgccggccagcgccacggctgctccgcccggcgccggcaccaggccggaaacgcccagcccggtgcccggcccgaccagcgcgagcggcgcggtgcgcaccgcggtgccggcacgcacgggcaccagcccgtcggcaggcaggtacggcagggccagcgccagcgcggtgaagtcgttgatggccaccagcgtctgcagcccgagcgcgcgccgcatgccgtcgatcgagaacgaccagttgtggttggtgagccggacctggtcgccggtcaccgggttggccaggccgatcgccgcgtggcgcggcaccggcttgcccgacgcggaaagtccgtcgaggtattggcgcagggctgcttcgagcgacgggaaatcggccaccttcagcgcggtcaccgggccgatccgcattggtgcggtttccagtgcaaagcgcacgttggtgccgcccacatcgccgagcaggcgggggaagtcagcgcaggaggatgcagtggtggccatggtgtcgggtagtgctccgcttgggaatcagtctgtcaggtcttgaacacgtcaagcccgtgccggtgccgtgacagcaccaggctgaccggcaacgacggcacagggccctgcagcgcgcgttcgagcacctcggccttggccgcgcccgacactgacaggaacacgcgctcggtggccagcagcgccgccaggttgagcgtgatgcgggcatgcggcgcggctgacgggcgcgtgatcacgtagccgggctgcggctcgctcagcgcgccctgcagttcgggcgcatccgggaacagcgaggcggtatggccgtcctcgcccatgcccagcaccaccacgtctggctggcggaatgcgctgttggcgcgcgccaccgcctgtgccggcgcggcagcgtcctgcgcatcggcaatcagcggcacgaaagcggcactggcagcggcctcgcgcagcaggtgcgcgcgcaccagggcggcgttgctgtcggcgtgctcgggcggcaccacgcgctcgtcgaccagcgtgatggtcaccgcttcccagcgcacgtgccggtggcgcagccgctcgaacatcgccaccggcgagcgtccgcccgagaccgccagcaccgcccagcccttgacgcggatggccagttccagcgcattgccgatggagatggccagcgcctcggcctggtccatcggggtgggatgctcaaacacgcgcatgatggtttcctttgcgattctgcgagcgcatggctcaggcttcctcgtgccacagcccgccgtcgcgcgacatcagcgccgacgacgcggccggtccccaggtgccggcggtatagggcttgggcggcacggtgctggcatcccaggtgtcgatgatgggttcgacccagcgccaggcctgcacttgttcatcgcggcgcacgaacaggcccagccggccgcggatcacgtcgagcagcaagcgttcgtaggcgccggcgcggcgcaccttgaacgagttggcaaagtccaggtcgagcgaggtcggcgtcagctccagcgtgtcgccaggctgcttgaccaggcagtacaggcggatgctttcttccggctgcagctggatcaccagccggttctgcggcgacagcgtcagcggccgcgggaagatcgcgtgcggcacgtcgcggaaatggatcacgatctcggccacgcgcgactgcatacgcttgccggtgcgcaggtagaacggcacgccttcccagcgccagttggcgatctcggccttgatcgcgacaaaggtctcggtgcggctgtcgggcgcgatgcccgcttcttccaggtagcccggcaccggcttgccgccgatggcaccggagcggtactggccgcgcacggtcttctcggccacgtcctgcggcgtgatcggcttgagcgccttcaggatcttgatcttctcgtcgcggatggcatcttcgctgaggctggccggcggctccatcgccaccatgcacaagagctgcagcaagtggttctgcaccatgtcgcgcagcgcgccggtgcggtcgtagaagtcgccgcgcgtttccacgccgagttcttcggcgatggtgatctgcacgtcctgcacccactcgcgccgccacagcggctcgaacagcgcgttgccgaagcggatcgccatcaggttctgcaccgactccttgccgaggtaatgatcgatgcggtagatctgctcttcggcgaagaacttcgccactgccgagttgattgcctcgttggattcgaggtcatgccccagcggtttttccagcacgatgcgcacgttgggcgcctggcgcgtgttcaggccggtgcgtgccagctgctcgcagatcgacacgaacaggtgcggcgcggtggcgagatagcacaccaccacttcaggcttgcgtgccagcacctgctccgcgagcgcatcgaaatgcgcgggcacgcgtgcatcggcctgcacgtagacaatgcgcgcgcagaacttgtcccatgactcgggcggcgcatgggctagcccggggcgcacggtctgctccagcgaggcgaggtagtccgcggtcgagagcggctggctgccggtggcgaggatgcgtgcggccggatgcagcaggccggcgtggtgggcatcgaacagggacggcagcagcttgcgccgcgccaggtcgccggtgccgccgaacagcaccatgtcgaaatcaggcatgctcaccctggactcctttagcgatttgaggacccgccatggaaggcgcgcggtgtggccagtttacgtgactcgccagcgcttggcgaggcgcaggccgcggcacttgcttggcaaaggcatgaccggagcgcgaagcgtacccgtttctgcgtgtgctgcgcagtggatcgtgcggtacgcggcaaagtgcgctaggctgaaagctcccccgcaggagaaccccatgccacgtcatccagtgctcgagcgggtcaccgcccgcatcgtctcccgcagcgccgcctcgcgccaggcgtaccttgaccgcacccacgccatggccgggcagaaggtcgaacgcgcgcagctttcctgtaccaacctggcccatgcggtggctgccatgccggacgccgcgaagatccggctgaaggccgacgagcggcccaacctggcgatcgtctcggcctacaacgacatgctgtcggcgcaccagccgctggcggctttccctcagtggctcaaggaagcggcgctcgaggccggcggcaccgcgcagtttgccggcggcacgcccgcgatgtgcgacggcgtcacgcagggccaggacggcatggacctgtcgctgttctcgcgcgatgtgattgcgctggccacggcggtggcgctgtcgcatcagatgttcgatgccgcgctgtacctgggcgtgtgcgacaagatcgtgcccgggctggtgatgggcgcgctgtcgttcggccacctgccggccgtgttcgtgccgggcgggccgatgaccaccggcatcagcaacgacgaaaaggcgcacacgcgccagctctacgccgaaggcaagatcggccgcaaggaactgctcgaggccgagacccgctcctaccacggccccggcacctgcaccttctacggcaccgccaattccaaccagatgctgatggagatgatgggcctgcacctgccgggcacggccttcgtcaaccccaacacaccgctgcgcgaggcgctcacgcgcgaggccgcgcgccaggcgctgaagctggtgcacggcggcgagcgctatacgccggtggccgaggtgctggacgagcgcgccttcgtcaacggcatcgtcgggctgctggccaccggcggctccaccaaccacacgctgcacctgatcgcgatggcgcgcgtggccggcatcgtgctgggctgggacgactttgacgagctctcggccgtggtgccgctgctggcgcgcgtgtacccgaacggcaaggccgacgtgaaccagttccaggccgcaggcgggctgcccgtggtgatccgcgggctgctgtcgctgggcctggtgcatgacgacgtgaccaccatcgtcggccgcgggctgcaggactacacgcgcgaacccgtgctgcgcgacggcaagctgacctggatcgacggcccggccgcgccgctcgacgacagcatcgtgcgcgccgccgacgcgccctttgcgccggacggcggcatcaaggtgctggacggcaggctaggccgcgcggtgatcaagacctctgcggtcaaggccgagcaccaggtggtggaggcaccggcgatggtgttcgagcatcaggacgatgtgctgcacgcattcaagcgcggcgagctggagcgagacttcgttgcggtgctaccgtggcagggcccggcctcgtgcggcatgcccgagctgcacaagctcacgcccacgctgacggtgctgcaggaccgcggcttccatgtggcgctggtgaccgacgggcgcatgtcgggcgcgtcgggcaaggtgccggcggctattcacgtctgccccgaggcgctgcgcgggggcgcgatcgggcgcgtgcgcagcggcgacatgatgcgcgtggatgcgcccgcgggcgtgctcgaggtgctggtgccggatgacgaatggcaggcgcgcgcgcctgcccgtccggacctcagcgccaatcgccacggcgtgggccgcgacctgttcgccaccttccgccgccatgtcagcaccgcggaaagcggcgcctgcacgctgttttcggacgaggacgacgacgacaacaacgcacccgtgctcggctagcccaggtgctgcaccggccggcgcgacgccgcgccggccgggtgcggcgcgctcgccgatggcgcgctgtcggccaccttcaccgcacccggcaccgaggcggcgcccggcacgtgcaattcctggatcggcaccgccagcttgctgccggcttgttccagcacatgcttgatgcgctcgtagaacgcgaaacgcacgttccagtagtcgtcattcgaggtccagtagcgcacgttcagcgtgatgccctgctgcgtgtagttgaccaccatggtctcgggcctgggttcggccagcaggcgcggctcgcgcgcgagcatcgcgcgcagcgcttccaggctgcgctgcacatcgctgtcgaaggtcaccgtggcctcgatgtctgcgcgccgcgtggcgttctcgctgtagttggtgatggcgcttccccacagcttgccgtttggcacgcgcaggcagacgccatcgaaggtggtcagctcggtcatgaagaggccggtctcgcgcacggtgccggccaccccctgcgcatcgatgtactggccgacgcggaacggccgcagcagcaccagcatgatgccggcggcaatgttctgcagcgtgccctgcagtgccagcccgatggccagtcccgcggcgcccagcatggcgatgatgctggcggtctgcaccccgaactgcgacagcaccagcacgatggtcagcacgcgcaccatccattgcagcgcgttggccagcagcgggcgcatggtctcgtccacgtgcgtgccgctgagcgcgcgccgggcgccccgggccacgcgggccgacagccaccagccggccatcaggatcaggatggctgccaggcagttcattccctggttgatggcgaactggaccaggtaagtccagcccgcctccagcttgttcgcatcgatgaagttcaggtccatgggagcggctccgtttgcggttgttatggaggagacaggcggtgctgcgtacccgtttctgcgtgcggcagcgggctgccagatcgcccccaggcgcctggcggggaatttcccgcttgacaacttgccgcacgttgccagcgcgatgtcggacgatcaccgacaatgccggcacggcaatacagtgaaggggacaagcaaggcgggatttggtttccggcgattgcgtcacgcggttgcgtgcaggcgcgccagcccttgtgcaatcaaggctggcggcggatcagaaaaatccgagcgagggaggaaccaggggcagccaggccaggctcggcgcggcgggccggctgtgcggcacaactttcagcgacgaaagttggcgaataggggtcggcgataccgccatccgggcatcgacagggacgcagaaacgggtacgctccctgccccggcaatgggtcaggccggatgatcgtgcagccggtcgcgcgcggccagcgcaggaaagagccgcatccacagcgccaccaccagcagcgtgccgacgccgcccaggatcaccgcgcccaccgggcccagcaatgccgcggtgacgccggactcgaactcgcccaactggttcgaggcgccgataaacaccgaattgaccgcgcccacgcgcccgcgcatgtcgtccggggtctcgagctggaccagcgtggagcgcaccaccacgctgatcatgtccgaggcgcccagcaccaccagcgccaccatcgacaacggcagccaggtcgatacgccgaacaccacggtagccaccccgaacagcgccaccgcgccgaacatgatgcgcccggcgcgccggttcagcggatggcgcgccagccacagcgccattaccagcgcgccgactgccggcgacgaacgcagcagccccaggccccacggcccggtgtgcaggatgtcgcgcgcgtagatcggcagcagcgccacggcgccgcccagcagcaccgcgaacaggtccagcgaaatcgcgcccagcagcaccgggcggctgcggatataggcaaacccggcaaacacggtgcgcacgctgaccggcgcggtcaggcgctgcgcggcctggcgcagcgtgatgccgctgaccagcacggcggcaatggcaaagagcgtggcactcagcccgtagaccacgcccggcccggccacgtaggcaaagccaccaattgccgggccgatgatgatggcggcctgcccggcggagctggccagcgccaccgcgcgcggcagctggcgcggcgtcaccacgctgggcagcagcgcctgcagcgtgggggtctcgaacgcgcgcgtggcgccgatcagcgcgacgaagacaaagatgtgatggctgtcgatccagccgctcaggctggccacggccatgccggcggccagcagcgcctcgatcgcctgacaggtgcgcacgatgcggcgccggtcgaagcggtcggccacgtgccccgacatcaggatcagcaccaccgacggcaggaactgcaccagcccgaccatgccgagcatcagcgggtcgcgggtcaggtcgtacatctgccagccgaccgccaccgtaaagatctggtagccaatcgtggtgcacaggcgcgcgaaccagtaacggcggaaaacggcgtcgcggaagacgctgtccggcgcggcggcctggacggtggctggggaagacatggatgcgggagggaggcggagatggctgcgcaccgcccagcgccgccgtgccgttgaggacgccacgacagccattgcagtgcacaaaggcaagattctaaagcgcctgctgaatacctgcatacagatgcccacacgcgcacacctatcgaaaaaaatattagtagttcacctcttttaggtgtccggacgtctgcacattgatgcacataaaccacaatcccgggcggcgggtgctggccgtttcgcttctgagaatcactcgcatttataatctcggcccattggcgcggccgcccacgacgtccctccccttggcttgcggaacgcgctgcttctcaggaatccatcttgcagcccgctttccgcctttccgggggtgccatcggcgccgccctgctgttcgcccagcttgccgccctgccggcccacgccgctgatcccgcgcctgccgccaaccccgaagccacgctgaacgccgtcaccgtggtcggcaactggctggagaacgccaacgaggccaaggtgctggagcatcccggcgcgcgtaccatcgtcgaccgcgagaccttccaggaagccggcgccaacaacgtgcgcgaggtgctgcgtcgcatccccggcgtgcaggtgcaggagaacaacggcaccggcggcagcgatgtctcgctcaacgtgggcgtgcgcgggctgacctcgcgcctgtcgccgcgctcgaccatcctgatggacggcgtgccgctggcagtggcgccctacggccagccgcagctgtcgatggcgccgttgtcgctgggcaacctggaaaccatcgacgtggtgcgcggcgccggctcggtgcgctacggcccgcagaacgtgggcggcatcatcaacttcgtgacgcgcccgataccgaagaccttcgtggccgatgcgtcggtgtcgaccgacatctacagccacggcggcagcgtcaagaccaacccgaccgcattcatcggcggcaccaacgacaacggcctgggcggcgcgctgctgtactcgggcatccatggcaacggctatcgcgagagcaacgaccacgtcaatatcgacgacctgatgctcaagggcacgtaccggatctcgaagaccgatgaactgagcgcggccttccactactacgagggcagggccggcatgcccggcggcctgacttcggcccagtatgcggccgacccgttccagtcggtgcggccctacgacaatttcgacggccgccgcagcgacttcagcctgaagtacagccacaacgacaataaccgcaagttcgaggtgctgacgtactacaccgacagcttccgcggcagcaacatcgagcagcaaggcaccggcacgcaggccaacctgcgccgcctgaccgcggccccgcgcaattaccacacgttcgcgatcgagccacgctactcgcagctgttccgcggcgagagcatgagccacgaggtcagcgtcggctaccgcttcctgcgcgaagccagcgacgaaaaggcatcgcgcacgctgttctacaccccgggcaccatcgatccgaccacgctgcgctcgccggtgtaccagtcgcgcacgggcggcaccaccgccaatgcggtctatatcgacgacaccatcaacgtcggcagctggaccatcacgccgggcctgcgctatgagttcatccgatcgtatgtgaccgacaacttcaccggcgctcgcaacgacgtctcgtccaacgagccgttgccgtcgctggcggtgatgtaccacgtcagcgaccagtggaagctgttcgccaacgccggcgtttcgttcggcccgctgcagtacttccagatcgcgcagaccaccaacggcctgacgcccgagaaggccaagacgtatgaggtcggcacgcacttcaacgccaacggctggggcggcgagctgacgctgttcaatatcgatttcgacgacgagctgcaactgcgcggcggcaccggcggcgcgccggacgcgtggaccaacctcggcgccaccacccaccgtggcgtggaatcgtcgctgcgctatgacttcggcgcgctcgacaagtcgctggccggcctgtcggcatacgccacctacaccttcaccgaagccacctacaaccagggcaacttcgccgggcgcgacctgccgttctattcgcgccacgtggccaccgtaggcatgcgctatgcgcgcaaccgctgggcactcaatgtcgatggcttcgcgcagtcgaaacagcgttcgccgggcgatccgagcacgtcgaccaactaccagacggcggaaagcgcaaacggtgcgctgggcgatatcccgggttatgcgctgctgaacatgcggctgggctatgacttcggcaagtcggcgcagaatctgaaggtggcggttggggtgaagaacgtgttcgacaagcgctatttcacgcgctcgaccgacaacaatgcgggcaagtatgtggggatgccgcggacgttctatatccaggcgtcactggcatattgaggcgaaatcaggctgagggggtgctcccctcaggtagcaaaacggctcgcagttgcgagccgtttttgcttttgcagctttagtacgcgatcaaacgatctcgcgcgtctccatgaactgcagctccgggaaccgctcctgtgtcaggcgcaggttcaccatgctcggcgccagatagacatggtcgcccgcgccatcgagcgccacgttatgccccgccttggcgatcagcttctcgatctccgcgggcgtgcccttgagccagcgcgcggtcgcgcattcatgcgattcgaaaatggcatcgacgccgtactcgtgctcgagccggtgcgcgaccacgtcgaactgcaggataccgaccgcgcccagcaccaggtcgttagaagcaagcgggcggaacatctgtgtggcgccctcctcggccagctgctgcaaacccttctgcagctgcttgaccttgagcgggttgttcaggcgcgcgcggcggaaaaactctggcgcgaacgacgggatgccggtgaacttgagcggctcgccctcggtgaagacatcgcccaggcggatggtgccgtggttgggcacgccgatgatgtcgccggcataggcttcttcggtggtgttgcggtcctgcgccatgaaggtgatggcgttgttgatcgccacggtcttgccggcggacacgtgcagcagcttcatgccgcgctcgaaacggcccgagcacacgcgcacgaaagcgatgcggtcgcggtggcgcggatccatattggcctggatcttgaagacgaagccggtgaacttgggctcctgcggctcaaccacgcgcgaatccgtgttgcgcgccagcggcggcggcgacagctcgcacagcgcatccagcagcgactgcacgccgaagttgttgatggccgaaccaaagtagaccggggtctgcttgccgttgaggaacgcgtccttgtcgaaggtgtgcgaggcaccgcgcaccagctcgatctcgatgcgcagctcttcggcctggctgcccaggatgcggtccagctccgggttgtccagcccgtccaggatcgcggccgtgcccttctcgccgtgcggatcgaacagctgcaccttgtcgttgatcaggtggtacacgccgcggaaggccttgcccatgccgatcggccaggtcatcggcgcgcactggatctgcagcacctcctcgatttcgtcaagcagctcgatcggcgaacggccttcgcggtcgagcttgttgatgaaggtgaggatgggcgtgtcgcgcaggcggcagacgttgagcagcttgatggtctgcgcttccacgccgttgaccgagtcgatcaccattaccgcggagtccaccgcggtcagcgtgcggtaggtgtcttcagagaagtcctcgtggcccggggtgtcgagcaggttgacgatgttctcctgggccttgccatcggcggtctcccggcggtaggggaactgcatcaccgacgaggtcaccgagatgccgcgctgcttttccagctccatccagtccgaggtggcgtggcggtcggccttgcgcgcgcgcacttcgcccgcgacctggatggcgccgccgaaccacagcagcttttcggtcagggtggtcttgcccgcatcggggtgggagatgatggcaaaggtgcgtcgacgcgcaatttcagaaacgagcgagctcacggcagcggagtttgactgggaaatattggatggcccggcgggcggccgggccagcgccggcagcgcccgcaggcgatggcggggccgggctctgcgggcacgcgaagggaatggggcgctattttaccggttttgggcaccgctccgggtttgtggcgcccaggtgcggcaagttattccgccagcttctctgccggcttgccgcgcaggctgccgaactgcagcgcgtactgacgcgtcagttccgcgccgaaaaagaagatctgtgccgagtaatacacccatagcatcagcgccaccaccgagcccgcggccccgtacgaggaggccacggcgctgttgcccaggtacaggccgatcagccgcttgccgatcgagaatagcaaggctgtgatgaccgcgcccatggtgacgtcgcgccaggcaatgcgcgcattgggcagcatcttgaagatcaccgcgaacagcgccgtcaccacggcaaaagaaaaggcggtggaaagcacatcggccaccggcgcgaaccacgattgcgtccacaactggccccacaggcgctcaaccacggccagcgccgcattgacgatcagagacaccagcagcatgaaggccagcaccagcaccaggctgaatgacagcaggcgcgtgcgcagcaattgctgccagcccgccgtctcgggcaccggcacatgccagatgtcgtccaggctgctcttgagctcggcaaaggcactcgtggcgcccacgagcaggatgcccgtcgccaccagcgccgccatgccgctgccgcctgcgcggtgcgtagccgccaggatttcctggatggccgtggcgccctgctcgcccaccaggccttcaagctgcgagaaaatctcgccgcgtgcggcctcggcgccgaagaacaggccggcgatcgagatcaccagcaccaggataggcgccagcgagaacagcatgtagaaggagagcgccgcccctttgctggccgcccgatgcgcgaaccaggagttgatggcggcagcgaccacgcgcagggtgcgtgcgccggtatggcggtccggcagccagtgcgggcgatgcctgcggtgatgtggcgccgcgctgccggcggaagaggactggtgttcggtattgtcggtcacggccaggtgctggcgcgatgcgccaggcggatcgcgtgtgcgttgcgcatgccttcggggcgcggtctgtgcggcgaaggcccgtgcgttcatcatactgcgcatcgcgcgctgccccaagccggcgcagggaggcaacctgctacagtaggaccaggcacacctgccggcgcaacccgtgcctgcgcgccggcgcaaggaggcaccgtgacctgcaacctccgcacgcgccctgcggccgtgctactgatcatcggcatgctgggctgcgccggctgcgaacgcagccagccgggccccaagcccatttccggcgcggcggccagcgccaccccggccgcgcccgccacgctcaatcctcccgacacaccagccgcgccggcatcggggcaaccacgctgacggcaccgcaggacactgaccggggcgtacctgtttctgcgtgacctatcggcggccggtgcaggtgttgccgggccgcgtcaactgcaacgccggtttcaggcgtgcaacgcgttgcaagagcgcgcctgcgggcctagcgcagcgcgttatcccgcaccccgcgtacgcaacgggcacccggcgccgcaccagcgcggccaccacgcgcgccgccgcgcgcatggcgcgttgcagcggcgaaaccgattggtctgccaccgcgccccaaggcctgcccgcgctcgtccctcataccgcaaacccgcgtggcataagcctttgcggcccttggcacacttgtcgctcaggcaaaacaggggcacatgggcccgtgcccatggaaccagccattgcatgcaggagaaaacccagacatgcgtcatccgccatcacgcatgacggcgcgccggcgctcctaccggctcgcgggtccgccgccgtcggtggtggacctgctgtcgtcgccactgctgccccatccgcgggcgcgtacgccgcccgccacgccggccgcgcaaggcgctggctgcgcagcgacggccaggcacggagttgccagggctgccttccggcgccacgcgggcaagcggcgcgcgtgaccgcaggcagtattggcaacgcaggatgtcgcggcaggctggcgccgcgaacggaatgatggcgggtacgcgagccagcgtgcccgcgcggatttggtgctccgtcccccggcgggcaccgttttttccacagggaggcacccgccatgacagccggaatgcttgccgccacggtgctggcggtgttctcaaccagcgccgcggcggcaagctatgcctggttcgaccgccccgaagcggccagcgccgacagccacgcggcggtcagcaatgatgtttacgtgcgcggctttggctgggcctggggggaactgcagctttcgccggacacgccgtccggtgccgccacgtcaacgccagggcggcaagcgcgcgacaagccggagcgcggcgcgatcgtgccgtggcgccagcatgacgagaacgggccgccgcgccagccgcgcggcaagctcagcatgaaccttgccgccgagctgatggatgcggccagcggcgagtccggggccaggcggcccctggcagtggtgcgctgacgtgccgacgggcacgaggaaaggcggagccggcgggcggacgtcgcctgttcccctttcctgcggcgcctgggattgcgtccggcctccggcaacctgcgccggcttgccgcttactcgcccgcagtcgcctgactctccacgcggatgttgtgcttgtgcatgagccggtacagcgtcacgcgcgagacattgagttcgcgcgcggccggcaccacgtgaaagccgtggctcgccatcacggtgcggatggcctcgcgctcggcttcttcgcggatcgcgtcaagggtcttgcgcggcagctccgccccgccgtgcagctgcaggtcttcggcggtgatcttgcggttgtcggtcatcacgatggcgcggcgcacgcggttgatcagttcgcgcacgttgcccggccacgcgtactgcatcattgcctgcgttgcgcaggccgagaacccgcgaatgcgccggtgggcctcgtgcccgtgttcggccagcaccgcgttggccagctgcaggatgtcctcgccgcgctcgcgcagcgccgggatggtcagcgtcagcacgcatagccggtggaacaggtcggaacggaagcgcccgtcggcctgtgccgccaccaggtccacgtgcgtggccgagatgatgcgcaggttcagcgggatcgactggtgcccgcccaggcgggtgatcatgccctgctgcaggaaacgcagcagcgccacctggctttccagcggcaggtcgccgatctcgtcgaggaacagcgtgccgccctgcgcctgctcgatccagccgatcttgcgctggttggcgccagtgaacgcgcccttctcatacccgaacagctcggactgcaccaggtgcgagggaatcgcaccgcagttgatggcaatgaacggtcccttgcgccggctcgaggcatcgtggatcgcctgcgcggcgagttccttgccggtgccggactctccggaaatgaacaccggtgcctcgttgtgcgccaccttggccagcgagcggaacatcgcccgcatcgccgcgcactcgccgatcatggtgccgcgcgaggcggtctcctgcgggcgcgtgccgtgcagcgacgccatgccctgcgcatgcttgagcgtgtagagcagttcaggcatcgagaacggcatgcgcacgtagtcgacgcagtagtcgcggatcagccggcgcacgcgctcctgcgccagcatttcatcggaggtgatggccacccacgtaatgtgcaggtactgcagtgcctgttcgagttgcgcgaactcggcatcgctgtagtcggactgcaggtcgatcacgcctgccatgggcgggcaggcccgcaccacgcgttcaaggtcgcgaatctgctggatccggcggatttcccatcccgtggctgtgccagacgggtcaaaaccaaaatcttcatgacgcgacacgaccacgatctgtgcagtgcgtgacgccttgcacagtcggtccatcacgatctcccggacgttaggcttgttcttggttcgggcacccgtgtccgccgtcgcggcctgcagccgcggcggacggtggggctgaactggctgcgggcacgcacccgcgcgcgacgtcggtatcacgagctggacagactgcggagttgctcatcgggcgcggcaagatcgtccgcacccacctggagctgagcgcggatacgccgccgcacagcctccttttcacgcatcaactccaggcgcggcgcctgctgcgactggccggagtattggtagtagagcgtcttgtaggtctgttggctcaggatccattcctgcaacagcgtgcgctggcgtgtcagttcgccttcgagcaggcgatggcggcgcagcaggttggccacggccgcgcgtgcgctgtcgctgagttcgctgtcgtcggcaagcagggcggccacctcggccgtcgcgccatcttggacggtccgcttgctgggtgcttcgcctgcggcttcccccacggcagcccaggcatgatggatggctcggatggagcggttattagtctccctgacaggcccgatagcgggtcgccggatctctcctgcggtcatgataatccccgttgaacaacatcccccggcactacacgtctgcggttaccacttgtcagtctttgaactggttttttgtctgcgtggcgcgcgtgtttcccgcacgctcccggatggtggctatgccgccttgttgacggtctggaccgaaatgtccaccgaccggcgaacggcgctcaagcgctctcggttggctccggcatcctgccgcatgcaccggagtcaagaaggggcgccttgccgcgcccctctttgccacgtctatagttcagtgcatttggggcactttgtccagccccgagtgggtgacttacagccaatctcatactttggtatgaggccgcgcgcacactggcccccggcctgccaccgccaccttttcggacacattacgagcagtcgatgtctgcatccatgctacgcagaaacgggtacgctttgacccccgaacgggtgatggcagcaccgtcgccgcgggtgccgcaagccgtgccgcatgcccgaggggtggcggactgtcacgcagaaacaggtacgcccggccggtggacccgctcgcgcggcacgcagaaacgggtacggctggcgggtgtcggacggcgctacggcgcccgcccggcatcacgatgtcaatatcatgacagcagcgcaccatggaaaaagggcggccctggccgcccttccttcatcccatgccggctggcgcgctcaatgccctggcaggtagtagaacttgaagatgaacaccgccgcgatgatccacaccatcacgggcacgctgcgtgcgcggccggtcagcagcttgagcgccgcgtagctgataaagccgaacgcaacgccgttggcgaccgagtacgtgaacggcatgccaagcgcggtcatcaccgcgggcacgacttcggtgacgtcattccagtcgatctccagcagctcgcgcaacatcaggcaggacacatacagcaacgccggcgcggtggcataggccggcaccgtgccggccagcggcgcgatgaacaacgccgcgaggaacagcacggccaccgtcaccgccgtcagtccggtgcgcccgcccgcctgcacgccggatgcgctttcaatatacgccgtggtggaagacgtaccgaggaacgagcccgccatgatcgcggtgctgtcggacatcagcgccttgttcagccggtccattttcccggccttgagcaggcccgcgcggttggccacgcccatcagcgtgccggtggcgtcgaacaactccaccaggaagaacaccagcaccacgttgatgacgccgatcgacagcgcggcggatatatctagcttgaacagcgtcgggccgagcgacggcggcgcggagaacacgccgtggaaggtattgccggcaaacgcaaagctcagcagcgtggtgagcaggatgccgatcaggatcgcgcccttcacccgcagatgatccagtgccacgatcacgaagaaaccgatgatcgccagcacggccgaaggctggtgcaggtcgccgatggtcaccagcgtggccgggctggcggtgacgatgccggcgttcttcagggcgacaatcgccaggaacaggccgatgcccgcggtgatcgccacccggatcgaatgcggaatgccattgacgatcatctcgcgcacgcggaacagcgtgaccagcaggaacaggcagccggagataaagaccgcgccgagtgccgcctcccatgcaaagcccatgcccttcaccaccgtataggcaaagtacgcgttcaggcccatgcccggcgccatcgcgatcgggtagttcgcgtagaaacccatgatcagcgtgccgatcgccgcggccaggcaggtggcgacgaacaccgcgtctttcggcatgcccgcatcgcccaggatcgacgggttgacgaagatgatgtacgccatcgtcaggaacgtggtgacgccggcgaggatctcggtgcgtacatcggtctggtgttcgcgcagcctgaacaggcgctcgatcagcgaaggcgcggcctgtggcttgccgtgcggcggattggcggttgacgtgcccggcttggaagcgggttccggcatcgacatgactggtctcctgatatcgttatcgtgtgcgcggcgacaacaacggcgcggccgcaggtggctggcttcggcctgaagcatcccgcgacgccccgctgggcggcgagcgtactctggtgcaggccggcccgcttcgccatggcacaggcgaataagcgatatgcaaaaggcgtgatgatcccacagcgcgaaccgctgaatccagcgccgccacgggggtgctccggggcgtccccggcttgacgcttgcggcaatcccccgtataaagccgcctagattcaagcgacgaggcaacagttcattcgttagccaccgtctggtacttcggttgtccatggtgtcctttccttgagttccccgtgtcggatgacgttttcgtcatgcgatgttttttgtcctttttctggaaagcaaatcatgcaaaccggtatcgtcaagtggttcaacgacgccaagggcttcggcttcatcaagccggacgcgggtggtgacgacctcttcgcccatttctcggaaatccgcgccgacggcttcaagtcgctgcaggaaaaccagcgcgtgcagttcgaagtcaagaatggcccgaagggcctgcaggccgcgaacatcaccccgctgtaagcattgactgccggcgcgccccgcgcgcgccgaacagcgtagaaccccgcccatggcggggttttttgttttcaggcgcggatagcgcgattggcggtgctgtctgcgccaccttcatcacatcccggcccccgccgctccccgcctgccccggtcatgcagaccgccaggcgctccgctccagcccccgcatgcccatgccgccgccagccggcacgcctggccttgcgcggcgcactttcccgctcaccatccagccttgcgctccacgcagaatcgggtacgcctgctgcaccgcacgaggtcaggcacggcccgtgagcctcgcagaaatgggtacggtctgtcctggcaggcctgcttgcgctgggcagcgggtacgcagaaacaggtacgccctgcggcactttggtctttccaggagccttctggcacgcagaagcgggtacgcccaaaaattttttttcgaattcgattcggccgatggcagcggttctccggcccgcattcctcctacatatccacaaagccgggccaggccgacgacgcagaaacgggtacggctaatgttgcaacgcaataaccatcggaagccctgaggctgccggcaccccacgcagaaacaggtacgcccacgggcacaggcgcaccactcgacgccacgcagaaacgggtacgccaacgacatgcaaggcggttggctacccggctgagctttggcatccatgatctgtctgcgcagaaacaggtacggcgcgtagcgccgcgagtttcccgcgtatacgttgagtgtgagtgctagctttttctgcaactctcatgtagaatggaaacttggtgaaagttccgtcagaacagcaccataggtctgcgcagaaacgggtacgcatgacccggaagagcccggcaggaggtacgcagaaacgggtacgcttcgcggcgcaccagggtgccagggtcggcacgcagaaatgggtacgccgcagaaacaggtacgctggggcagcacggcagcggcctttcaggccagcgcagaaacgggtacgcctgacgtgcaaagcgcccgtcagcagcccggcaagtgaaccagtttctgcggggataaccgggctctggccgtactttctgcgggaaagaggcactggaaccctcgcaagccgcgtatacccggcgctcgctcgcagaaacgggtacggtttgaggagtggccgctgtggaaaaggctgtggaacctgcaagttatccccgcagaaaccagttcgccccacccgcagatacaggttcggcttgccgcagatacgggttcggcccttcgcagaatcgagtacggttgcccgcagaatcgggttcggtggggttggtttttcccttacgaatcaaggcgctgaacttcacgtatacggtttacaagtagttaacccgtatcggtatcgtttactggtagtggatggctggcgaaccgtggacaaccctgacgggttgcccaccgtccaccaccatgcgaccagtcgtgagattcccagccggcagaaaacagggcgagcaaggcaagggctttgcgtacctgtttctgcgtgacaacctttgcggcttcgagtacaaaggcgggtaatccgaagcacgccaatatgcccatcaaacgctccccggccaccacgggggatcgaagcgtcctcgacctggacgccgaaccctcccgcatcattgttcccggcaacgagaacaacctggttccgtccgagaaattccagcgtctgttcgacgaagcgcaggccatggagcgtgaagacgcctggcaaagcggtgaagtcggcttcctgagccgcgccagcgtccaggtaacgctgccctaccgcgcgcccaagggcgcgccgccggtatggacccgcaccagcggcaatatctcgctgatgatccagcctggctacttcacgcagcaacgttccgaacgtgccaccaacggccgccagaagctggtgtccgagaccgtctcgctgggttacccctatggctcctatccgcggctgatgctggcctggatcggcaaggagatcatggcgaagaaaaagcgcggtgaattcaccggcacggtagaggaccggcgcatttcgctgggcaattcgctgtccgagttcatgtacaacctcggcattccgatggccaccggcggcaagcgcggcacgatgacgctggtacgccagcagatgatccgcctgttctcggcgaccatcgccatcgtgcaaaacaagtcgacgccgagccagaaccagaaccccaaccacgagccactgtcgatcgatcgggtgggctacctgctggccgatcaactgtcgacctggtgggaccccatgcagcctggtcaggggtccatgttcgagagcttcgtggtgctgtccgagccgttcttcaacgaactggtcaaccgccccgtaccggtcgacatgcgcgcgctcaaggcgctgaaacagtcgccgttcgcgctggacgtgtattcgtggctgacctaccgcttcttcaccatccagcgccgcacggaaatcccgtgggaagcgctgcagatgcagttcggcaccgagaccgaaagcgagcgcaagttccgtgcgctgttccgcaaggccctgaaggatgtgctggtggtgtatcccggtgccaaggtcgatgcggattcgtccaaggcgctgatcctgcagccttcccggaccagcgtgcgcaagctgggctgatttgccagcttcccgcccggggagatccgcgcacgccgttgcacgtgctctcgggacggcatcagcaggtccgggcgggccggaactgaggccggacaccatgtccggcccccgaatgcaaaaaaggcaagcgttgaacgcttgccttttttgtttgcccgccgcggacggatccgcaacgggcggggtcagccgaggctggtcaggccggcttgattgccgaagcctgcaggcccttcgggccttgcttgacttcaaacgtcacgcgctgcccatccttcagggtcttgaagcccgagccctggatttccgagaagtgcgcgaacaggtctgcaccaccgtcgtccggggtaatgaagccaaagcccttggtctcgttgaaccacttgaccgtaccggttgccataggaatttccttttcgaagcaagttcttgtacacaacgcaaacaaccgttcaagcacgttgagttctcgtagataccgaacggaagccgacgaggttgacacgacttgactcgactgtagcgcgcatcataaccactttggattgcggtgtcatgtgcggcgtaatgcgcactatagatactttaggcacatcccgggctgtttttcaagcaattttacggtacggctcgtttccggctgccaaatggcggcctctgctctctgcgttggcaacatatattttgtaaatttggaaaacggttgaagcatcacgtgcttttggctacagttgcgccttaagaatcaaccgcgctttcagcgctgaaagagaggtcgcagtgccagccaaaatcatcacagtctttaaccagaaaggcggttgcggcaagactacggtcagcatgcaccttgctggcacgcttggcctgcgcggcgcgcgctcgatgctggtcgacatggacgagcaaggcaccgccactcgctgggcggcgcaggccagcgacgagcggccgttcccggcttccgtgattggcctggcgccctcgggcggcgccatgcaccgcgaagtccgcaaattcgtccaggattatgactacatcgtcgtggattgcccgccggcggtgcattcggcagcgccctcgagcgcgctgctgatttcggaccttgccattattccggtggtgccttctccgccggatctgtgggcggcggtagcggccaagacgctggcgcagcacgcccaagtccagaatgagtccttgctgatccgtgtgatggccaatatggtccagcgccgcgtctcgatcgcgcgccaggccattgaaatccttggcgacgacggcgacgtaccgcttttgaattcgatgatcgggtcgcgctcggcattccgggaatgccaggcgatcggctgcaccgtgcacggcgttgccggcgcacgcgaggcggtgcaggaggtcgacatgatggtcgacgaaatactgtctttgattgagcactaggtatggctaccaaactgaagagcctcaaggctggcatgctggccggcatggcggccgaaaagacccgcaacgatacgctggaccgcttcgctcgcgcggaagcggccatttcccagcatccgaatggattgctgcagggcaggggagccgatggcgcgcccgttttcagcgctgaaagtcttggcgaagccgccgcgggccggcagctgatcaggattccgctggagcaactgcacgacaatcctctcaacgcgcggcgcctctacgatcccgccgtggtgcaggagcgggcggcatccattgccacgcacggccagaagacccccggcctggccgcgcccgatccggcgcgccccggccattacatcctgatcgacggtcattaccgcaagcgagctctggcgtctgccggcaagctcgagatggaatgttttgtcgaaaacgacctgagcgacctggacttctaccggctgtcgttcatgctcaacgagcagcgctcggaccagtcagcgctggacaatgcgatcgcctggcgccagttgctggacgaaggcaaggtccagaaggaagaggaaatctgcgagctgaccggcatgtcggccggcaccgtgaacaagacgctggcgctgctgcgcctgcccgagtccgtgctgggcgtgatgcgcgagcgcccgagcgcgatcggcatcgccgcgggctatgagctgacgctgtactgcaagctggcgggcgaggagcgcacgcgcgaactggcggcgcgcatcatcaatgacggcctgtcgagccgcgaggttgaagccatccgcaagcacgcgcaggaaggcaaggcgcgcaaggtcaaggaaatcagccggcaatacaagatccggaccgacagcggccagttgctgggcaccatcaaggaatgggactcgggacgcgtgatgctggacgtgcagctgagcgaccgcagtgcccgcgaggcgctggtcgaggccctgaaggcccgcttcgggctggacaacacgctgctctgagccgggcaggcaagccatggcgccgctgcggcagcattgccgccgcagcgctcaagccagcaggtcgcgcggcgagcgcgcgccaaactccggatcacaggtcttgcggtagcgctcaagcatgctggacagcagggcatgcaggccacgcaccgagtagccggccagcggcaatgccgccagcttgcgctgcgcgcgccgggtcggcggcgcggccggtggaccgatcagcgaggcgtcttctgtgcccgcaccgtcccactggaggttgcggtcacgccaatgccgggccagcgcgtgctgcgtggccaggccaaagccgggcgttccgtctggcacaatgctttccacaccgtcttccggaacccgcgcaggctgctgcatcggcgccagcgaacgccgcgtgaccgaggtcagccggtccaggctgagccggtgttcccgcaacagcaggattgccgcatgggcggtccggtagcgctggccatcgtcgtcgccgccccggtgttccagccatgacaggaagggagccaggctggcctcgggaacctgcaaggtgtccggccgcgccgcctccgttgccgccgaggcatcggtgccgtccgggatccgggctggccagagcgctgtgaccgggtagccgttggcatgcatccagcggaacagggcggccagcacccgcatgctatgccgcacgcttgccggactgagcgggccggtgaacggacgccagccggccaggtggcgcggtgcccgcggtccgcaccagcggctgcccggttcgggctgcgccaggaagcccaggtaggcccggcggtcgtccagatcgagctgcgacaggcccttgcgccgctccagtgctgcccatagcagcaagcgctccgcctccttgcggtaggccgagaacgtgctgccgctgtcgccggcggcatcgcgcagccaggcctggacgacgtcgaggccctgactgtacgggcagctggcgtcagcggctaacgcgggcgacgcggtcatccattccagcggcaacggctggcgcatccctggtcccagcctgcctcgctcgagcagagtccggttgccgacgtgcgcgcccagcagcggcttgccgtccgggtcccggaaggcagcacggttctcgctgagccagcggttgacggccgcgccggcaagcgcgccaatgcgcgggacggcccgccaccaggcgctgccgcgtcggtttgcaagctcaaaaagagaattaagggtcacaatttcagccttgcgcaagcgtcgcgccaaggctggtgcaaaccacaactccacgccgtgctgggggcgcggcgccgccgtacccaaccgttcgagctcagccagcgcgtcgacgcggcgatccatgccgcggttggagcggccagggccggccagcagcagttcggccaggtccgcccgtccgtgcaggtgcgcgagctggaccatccggtcgcgcagggcaagcaggatccgcagcgcagactcggccccggcttcgtcgtcatcggcttcgtcggccaggtagcggggcaccaccatggccgccggcatgccctgcacataggcgcgtaccgccgcaaattcgctgcgggtgaggctgaccatcatcattccaggaatcatcggcaggtatgcgctgaatggctaacttcttgatttataaggcacttgaagcgagcgagaattcatccggcccgaaatgcatagataaatacaatgccgataattttatgcgcgttttcactggaaagtcatccccgctgcccttgtggcatccgtatgctggtgtcaggcagtgctcggggaaaacccgccgcagcgcaccatcaccttgcattcgacctacgcgtttcatatgctgcaggtcaggagttataaatacttagatcagacttcagtcgcatctaagactctttctacataagcgtcttaacacgcaaaacggggcgatccggtatctccacgggaaggacggacctgcagcctgacgggaaggctgccgggcggtctggagcgatggcggatcgtatggaagtgcaaccgcaagatagcggagcatttccgacaagcaagcgcggattgtcgcagggtccgaacttgccgcaataataagagagcggccatggccaccatcctcttgatcgagcctcaccccctcctgcgcctgggtctgcgccatctgctggcccaagcacatattcctggtgacctgatcgatatcgatcccctcgccccagtcgattcagatttgtggctgtacgatgccgacctgctgatctatggcctgccagccgatcacgccggcggctgggccatgctggaggaactgtgccagcggctacgcccgcagcgcgtgctggtcctcagcgatcaggcggccccatcgctgccggatgcaggcttgcctgacccggtgcgcggctgcgtggccaagagctgcagtgcggatgcgctcgatgccgcggtgcgcctggtgctggccggcggcgagtgcttcccggcgcgtgcccaaggcagccaccatgcctggcaatcggaactcgatgccggccataccccggtggcaagcagcgcagggcagggcgaggcccgggtcgtggcgctgcgcgcaggcatcggcgaggccgtgctcgagcatgcggtgcccgcgccccagcgccatttccaggcgcacgcgacgtaccacgaaaccccgtcggccggcgcgcacctgctgaacatcaccgaacgccagtacgaagtgctggcgctgctggctcggggctatcccatcaagacggtcagccgcatgctgaatatctcggtggccaccgcgaagacgcatgcctgcacgctgtaccagcgcctgcacgtacgcaacaagggcgaagccgtctacgttgccctgcagaagggtgccacgctcaactgggccgggcccgccacgcccgtcaatccggtgacccgggtgccggcacctgatcccacctgccaggctgcgtgacgggtggcggcgcggcgttcacgggtcgcgcctcatccttctggcgtgcggctctcggccaaaagcatgaggcaatggcagcggcggcttgctaccttgtgatgaaaggcatctgcagacactttttccggcggctggcgctgccctgatgccctgcaaggcgggccgccccgcggcccgaatcccgacccggtggcaagcgcatctgcggcccgggccagctgccagaccgagtcaatgccgacctatctcatcgccagcaatgaaatgatgtgccgtgtcctggcgcgtcgcctgaacgcactggacgtgccgcagccgatcacgtggcgcacgccgcagtggctgcatgaatcggcgcgcgcatcgacgcaggcttcgtcatcggagccatcgccggacccggccgatatcgcgctgatcgattgcagcgcactggagggcgacccgcgtgcgttgctggaccagctgcaggcacgcctggcgccacggcgctggctggtgctgtccgatcgcctcgatgcctcgctgatgctgcatgccgcgctgctcggtgccagcgggtgtctcgcgctgccggcaccggttgaactggtctgcgccgccaccgcgctggtgtgggccggcggccagtgctttccgcgcatggcgctgtcactgacgggcgccaacggggccacctcctccctcctttgagcgagcagacctacatccaccgtaggagtgcgcatcgcacctgattgcctatgcttgattcgcccggaggcagaagccagcccagtttgcaggcaggccgccctggggaagtaagggggtcatatggaggccggactggaattcctcgtcgttcgcggctttgctgtgcgcgaaggcagaggcaagtgggcgtgctgcttcgagatcaggctggctgccagccttgaccatggttgccacgcgggtgccaacgagggcagcgatgagccgctgctctatcgcggtgaactgcacgggcgtcagtttgactgcgagctggccgccgccgacgcggcccgcgcggccggcgagcgcgaagcgcggctgcgtgtggaaagcctgagggcgctgatcatttctcagcatcggcatcgcgtgccgccaccactcgtggcctgaaccagcaggcatccagcgagaatcaggcacagtggcacccggcggcctcgccgggtgccactgtgcctttgtcattctcttcgtcgtcgcgcagcttgccaaaatgaaaatcgcccagttggggcgatttcatggcaaggtatttgcggaacaggacaccagccggcgagccaaaaaagaagcccgccgaccgggggaccatgcgggctttgaaggcgtgcgggccatactgcccgcccacacgtctccttgacgataaccaatcagttcgcagtcctccatcaaccagaagcaccatgcgcgcatatttgcggctgagtgcccccctgaaccgcctgaaccctttgcgggtttgtgcgccgtccaacagactggccagaaccgcgcgcgccaagatcgccatcatggccaatggcagcaagtatctggctcgggttcagggggagacggaaaaatgactggtgtcagcgctcggcctgccgtatcgctcgtcaggcacgcgcgcgggcccggcatgggccgtccgtacccgctcatgaagcggcatggcaggcgcggaggtcactagtgcacggcgacaccaggatgcgtggacggggcggaccaggattgcgcggcggcaatccggtgtggtcgcacgtcaactgccatatcgacctttggatcgagctgctgcacgggctggacctgccgccggtcgcggcactggcctgcgcggtgcggcaggacttcgaggccgaccacttcacgcagtgccgctttccggatgccgacctggagcggctgtacggcctcaccgtgcacgccctgacgttctacgactcgctcgagtcgcacgttgcggcacagacctcgcgcggccatatcgtcgtgatggagctggacagcagccagctgccgccaccccgcggcgccggctacctgcgccattgcatgcccacctgcattgccatcgatgtgttgatccccgaagccggcgctgtcggctactaccactccgacggctaccacaccgcgaccggcgaggactacgccgccatcattcgcctggcaccgggcgtgcgcagtgccgacgcgctgcccttcatgcacgccgatgtggtccgccgcaacgggcatccgcacgctgccgagacgctgctcgaggcctcgctggcattgctgcgctttcacctgggcaaccgtccgcgcgagaaccccgtcacaatgtttcgcgcggtatttccccagcatctcgagcggctgatggcgcgcggggaaccgggctttcaccactacgcgtcgggcgtgctgcgccagctcggcgccaatttcgagctgctggcgcgctacctgcgctggctggtgatgcacgggcaggaggtgcccgagaaggcggcacaagcctgctacaccatggcctcggaggcgatggtgatgcagttccgcctgatgcgcgcggtcatcagccgcaagccggaccgttgcgaagactgcctggaccagctcgaagcctcatacctggccagcgtgccgttgctggccgcgcatttcggcgagttcaagccatgagtcggcagatcctgcctgcagcgggcaacacttggctggtgtgccgcctccggcgtctggcacagaaccggttcgatccggcgccgggggcaacccggtgcatccgccttttgcacgatatcccgggtctcatgccgacagcggagggcatgccatgcatccagccttgcgtgcctgccgtgactgactagcccgtaacagcttccatctgccgtgccgcctcgcctcgtatggcggcggcggacatcgcagccgccgcggcgcatggagcccttgtcagcgcccgcttcactctcgcctttccgtccaacctcccgatggatgaccgttccccagccgttcgcctactgtcggagcgcgctgccatgacgctaaatagaggcactggcttgcaaagagcgccgcacctgggtcggcggcgcagccagccggttctcggaaagcagtcgtgccgagccaggccggcagagcgttgttcccggactcgggattggacagggggtacgaaaatgattacgcatcgatcggatctgcatgtcaatcacctgctcagcgcgctgccgcgcggcgagtgggagacgctggcgcagcacttcgagctggtccgtctgcgcgccggcgaactcctgactgattccggccagcgcatcgtccatgtctatttcccgaccaccgcggtggtatcgctgctgtcgctgctggaggacggcgcgacggtcgagatcgccgcggtcggaaacgaagggctggtcggcatcccggtggtcaccggcggcgacaccatgcccagccgggtggaagtgcgcagccccggaatggcctatcgcattcccgcgcgcctgctgcgcggcgacctgccgcgcctgcccacgctgcagcgcgtgacgctgctgtacgtgcaggccatgctcacgcagatcgcacagaccgcggcctgcaaccgccaccactccctgaacaagcaactgtgccgctggctgctgctggccatcgaccggctcagctccaacgagctggtgattacccagcaggtcatcgccaacatgctcggcgtgcgccgcgaaggcgtgaccgaagcggccggcaagctggaagacctgggcctgatccaccacagccgcggccatatcaccgtgcttgaccgctgcgggctggagaagcattcgtgcgagtgctacaagctggtcaagcgcgagtatgaccgcctgctgcccgcgctggccagcgcctgagcggcacgcttcggcgcgtgtggcctgcgaagcgcggcgtgtatacgccgcgccgatcccatttgaggagctgtagtcgtgagcagactgtcatatgccggtggcccggctgagagcgccaccccgcgccgtgaggcccagccgggcgtcacgcaggcgcgcgcgctgatggaccacctcggctggattgccgcggctggcgtggccggtgcggccgcaggcttgctggtggcgctgtcggcgccgccgcagtatcgcgcgcaggcgctggtgcaggttgaggggcgcgatggcggcatgcgcagcgtcgcccagatgcagggcccggcggccttcgacgcaggcctgctcaagagccgcgccgtggtcggtccggtggtggagcggctgcggctcgatatcaccgcgcagccgctgcgtgcgccgctgctgggcgcgctggtccagcgcttttccacacccggccagccgcgcggcacctggcctgccagcctgggctatgcctggggcggcgagcgtctggtaatcgccagcatgaccgtgcccgaggcgctggtagaccagccactcaccttcgaggtgcgcagcgacggccgctaccgcctgatgcagcaggacaccttgctgctggaagggcgggccggcgagactgcgatggccaacggcattgtgctgcgcgtggacaagatcgaggccgggcccggtacgcgcttccagctcacgcggcacgacctggcccgcaccgccgagtccgtgcgccgcgggctcacggtggaaagcgaacgcagtgaaaccccggcgagcctgggcggcgcggccgaccccctgaccgcgccgggcggcaccgtgcgcgtgagctggcaatacccggaccgccagcttgccgcccaactcgtcaacggggtcacgcgcgcctatatcgacggccagaccgacaagcgccgccaggacgcggccggcacgctcgcgttcctctcgggcgagctgccgcgcgtgcagagcgaactcacgcgcgccgaagaggcgctcacgcgctaccgcgcgcgcacgggttcgctgcagcccagccgcgacgcgcagtcgttcctcagcaacagcatggagtaccagcgccagatcgcagcgctcaagcttgagcgcacgcggctgctccagcgcttcacgcccgaggccaacgaggtccgcaccgtcgacagccagatccagcagatgactcgcgagcgcgcggagatcgacgcgcgtatgcagaccctgtcggcctccgagcgcgaatcggtggcgctcacgcgtgacgtcaaggtggccgaggacatgtacatgtccttgcgcagcaaggtcgagcagctgtcgctgatgctgtccgacagctctacccagatgcgcgtggtcgatgccgcgatcgcgccggtcacaccggtcggtctcggcgcgtggccgttcgcctccgccggcgccttgctcggcctgtgcctgggcgtggccgcgatcaacctgcgccagcgcatgcgcccgtcggtggccagcgccgccgatgcggaacagcgcctgggcatggccatgctgggcgatatcgccttcagcaacgagcagaccgagctggaacggctggtcgaagccaagcgccgcctgggcatcgcttccggctttgtgctgccgcccaatgtgcgcctcggccggccggagtctgtcaccagcgtgatcgacgccgccacggccgccgcgcccgaggacgaacgcgcgcgcgccgaacggctgctgcgccagggcctgcacgaccagttcctgctggcgcggcgcgccccgcattcgcttgccgtggaaggcctgcgcacgctgcgggcggcgctgcatttcgcgttgcgcgatgcacccaactgcgtggttgcggtgaccagccccgccgccagcgccggcaagaccttcgccgcggttaacctcgcggtgctgttcgccgaagccggccagcgcgtgctgctggtcgacgccgacctgcgccgcggccgcgtggcggactggttcgacctgcctgccgagcccgggctggcagaagtgctcgctggccgcagcgcgatcgccgaagcggtcaagccgagcgtggtcaatggcctgttcctgctcagccgcggcgcggtgccggccaatccgtccgagctgctgatgctgcccgcgctggcggaatccctgcggctgtgcgcggggcgcttcgacctggtgctggtggacacgccgccggtgatggcggtggccgatgccacgctggtggccaacttggcgggttccacgctggtggtggtgcgcgccgatgtcacggcgacggcgcaggtcgatgaaaccctcaagcgcctggcgcacgccaatgccaggctggccggtggcatcctcaacggtgtcatgccccggcgcagcaaccgggcggacttcaataccatcaatccttatctggggatgccgttgccacgagcggtagcgaagcctcccgcattggccggtcaagccgatcgggtagggaaaaactgacgcatgccaaagcacgccagaaaccgcaccgccatttgtgtgggtgtacctgtttctgcgagcgtttggcggacgttctgagcacacgcattggtgtgaaaacgcactgatgcgcgtgcgacgttcaggctcaataggtcaccaaggcgttgtacctcaacctggagcccaccatgcgagcagcgatacgcaccatacttttggaagtggcccgacttgacgtaccagttgaatcgctggacgaccaggccgatctatacgaagcgggactgtcatcactggcaacggtgcaagtcatgctcgcgatcgaaaataccttcggcatcgagatacctgaccgcatgctgactcgccagctgttccgcagcatcagcacactggctgcggcgaccgagcagatcaaacaagagcaggaggcggcatgagcccggtcctcgccagcgtcgagcaggcctttccgcgcgcagagactgctgacgccgcacacttgctggccggagcgcgcctggccgcggcagaagcagccaggcatgcagaccaggtcgacgccgatgcgtgttttccgcaccaggcgtttgcagtcttgcgtgagcagaggttgctgggcgccatggtgccgccagcctgtggcggtgatggcgcgtcgctggaaacgatcgcagcggtctgccgcgtgctgggcggtgcctgtgcctcgacgggaatgatctacgccatgcaccagatacaggtggcatgcctggtcaatcatgcgagcaccagctcgtggcacgcgcagctattgcagcgcctggccagcgaacaattgctgctggcttcggccacgtccgaagaggcgattggcggtgccctgcgcagcagcggctgcgcggtcaacgccgatggcggcaacctgtacttgctcaagatggctccgaccatttcctatggcgcccatgccgacgggatcctcgtcacggcacgccgccatcccgatgcctcgccatcggaccaggtcatggtaagcgtgctcaagccagactacgtactggaaagtctctccacctgggataccctgggcatgcgcggcacctgcagcaatggattccggctggaagcccgcgggcataccaatcagatcctgcccgtgtcgttcggcgagattgccgacgtcaccatgacccccgtgtcgcacatcttgtggtctgccttgtggaccggtatcgccgcggatgcggttcagcgcgccaaggtgctgttccagggccaggcgcgcgcccggcctggcacgcttccgccctcggctacgcgcgtggccgaagcggttgccattatccagatgctggaggggcggctggaactggcgttggctcaccaacgccagcgtcatgcaagccagagtgtgtcggcaattttcaacctggcggcggaaatgaacgggctcaagaccagcgtgtcgtcgctggcgctcgaagcggtgcaaatcgcgatgctggtctgcggcatggcgggctacaagcatggcacgccgttcagcctgggacgccacctgcgggatctgtggtccgcccccttgatgatcaacaacgatcgcatattgaccaataccgccaatctgctactggcggaccggtccgcctgaggagccgtccatggacgataccagcaacgcttacgtgccaggcgacgacgcatccgttgccccgggtgaccattctgccatggccaggccggcgcaggatcctgacacgggccgccgtgcttaccggcaggcgctgattgacgcccgcgtgctctttccctcgacggtcgatggcatttatggccgtagcggactgttcgagagtattgccgacggcttgaactacgccgtcagcaaactgggcgccgaccaggacgcggaggtgatgcgatttcctcctgccatgccgcgcaaggatttcgaagcgagcgagtatctcaagggctttccccaactggcagggacggtgcattgcttctgtggcggcgatcgcgaacatcatcgactcctggcgcgcctggagcgcggtgaggaatgggccgatcagcagcagcccaccgatgtggtgctggcgcccgcggcgtgctatcccgtctaccctgtggtggccagccgcggtccgatgcctcgggaagggctggtggttgacgtgttgacgtattgcttccgtcatgaaccttcgatcgaccctgcacgcatgcagatgttccgccagcgcgaatatgtccggctcggcacggccgagcagatcgtggaattccgtcaacgttggatggaacgtggcacgcaactggccagcctgcttggcttgccgcatgaggttgacgtggcgaacgatccgttctttgggcgtggcggcaagatcgtggccgacagccagcgcgagctcaagctgaagttcgagttgctggtgccgatcaatgatggcgcgccgcccacggcttgcatgagtttcaactaccacatggaccatttcgcgcacgcatggccgttgcgtaccgcggacggcgcgccggcgcacaccggctgcgtgggctttggcatcgagcgcctgacgctggccttgctgcgtcaccacggcttcaagccggcgaactggccccagcgggtgcgtgacgtgctcggaggcatctgagacggagcggcattgagacgtgagcagatgccgcatccattcggcccatgcagatgcagtgccgaccgatgcgcctggtggtccgccctgcatcgaacttctgcagccgcccggagcagcgaggcatgctccgcgtggccagcgttccagcacgggcaggctgtcacgggagaggcagtccatgaagtcgcaaacttatcctgacacaagcattcttgcgtccggtcagcaagcactccccggcggccgcccgggcgttgccatcggcagtaccgcgctcggcggcgagtggacatgggtgcagacacccgccggcgcggccgaaagccccgctgcattggatcctgccgcaggctggctgccggccccagtgcccggcacggtggccagcgcgctgcgcgccgccgggcgatgggacgacgcaatgccgccgccattgcaccagtatgaccattggtatcgtgtgaactttgccggccgcggccggcgcgtgctgcgctttaacgggctcgccacggtggtcgaagcctggctgaacggaaagcttgtgctgagcgcgcggcatatgtttgtcgctcatgaagtcgaggtcgacctggacggcgacaacctgatgcacctctgcttccgtgcgctccatccgtggttgcgcaagcagcgcggcccggtgcggtggaagccaagaatgatcgtgccaccaatcctgcgggcgattcgcacgaccctgcttggccacatgccgggctggtgcccgccggtccatgcggttgggccctggcggccggtggaactgcttgacccggccagtgacgacatcctgcatggcgtgcgcgctgatctgtgggggcgggtgcaaggagatcgcggtgtgattggcctgcacctgcacttcccggcatccgcgccagcgtctggatcgttcgaggccatcgacggcgagggatgcatctatccgggctcgctgtcgcgtaccgacaggttcacactcgaaggcacagtctgcgttgaacgtccaaagctctggtggccgcatacgcacggtgaaccccacctctaccgtgtggatgcaaccatcgagggacgcgccatccactgcggacgggttggctttcgcaccatatcattggattgttcaagcgatgccggggccttcgcactgcgcatcaacggagagccgctgttctgccggggggcgtgcatctccagcaatgatctgcacggccttgccgacacggatgaagcatcccggcactggctggagctggcgcgccggggcgggatgaacatggtgcggatcagcggcgtcacgtgctatccgggcgcggccttctaccggatatgtgacgaacttggcttgctggtctggcacgatttcatgttcgccaattttgattatggcagcatcggaccgggcctcggcctcaccgaggacatcacgcgcgaagttggcgactggctaagcgccaccctaacccatccgagcattgccgtgctgtgtggcggcagcgaggcagagcagcaggcggcaatgatgggcgtctcgcgcagcgactggaagcagccactgttcgacgaactgatccggggcttggttgccgccaagcggccggacgtagtgtatgtcggcaattcgccaactggcggcgcgtggccgttccagccggacactggtgtgagtcattactacggcgttggagcctaccagcgaccgttggcggatgcgcgcttggcgcaagtgcgctttgcttccgaatgtctggcatttgccaatgtgccctgcgagcgcacgctggcggaacacggtttgtcgcagccgctgcattcgccccgctggaaagccacaataccccgcgacgcgggcgcaccgtgggatttcgaggatgtacgtgagtactacctgcgaaccttgtacgaagtggatccaccgcgcctacgatatgagcagccgcagcgttacctggtgctgtcccgtgcggtggtcgcggaggtgatgacagaagtcttcagcgaatggcgccgggtcgggtcaagctgtgccggcggactgatctggcaattgcaggatctcgtgcccggagccggctggggcatcgtcgatgcgtgcgggcggccaaagtcggcctggcatgccctgcggcaggtctggcaaccgctgcaggtattgattaccgatgaagggctcaacggactgcacgtgcatgcgatcaacgaaacgccgcaaccgcacgcgctgtcgctgacgctgcgctgcctgcgcgacggcgagacagttgtggccgaagcccggcacagcctgttattgccggcgcgtggcgcggcgcgcattgaagcagcggcgctgctggaccgcttcttcgacttcacctatgcgtatcgcttcggcccgccgacgcacgatgtggtcgtggtcacgctgcatgctgccgacagcggcgagccgctgagccaggccgtctaccttcctgaccgccgtgccgccgcgctgaagccccccgggttgcgagccaggctcgagcaagtcgacggtgactggtggctgacggtatccgcgcagcgcttcgcacgttgggttcacatcgacgatcatgcctttcaagcgaccgataactggttccatctcgcgcccggcagcagccggcgtctgcggttggtgcatgaggcggggaaggctggcgcgcacgctcccgcgattccttccggcgagatccacgcggtcaatgcggagcatccacttggctatgatggctgaccgccgagccgggcgccgttgctgttgcggcgctcatgccccgggatgcccgccgtagaacatggcgggcacccccggccctatgcgcagacttggtgggacgtgccgaacgccgacagcaagccctccatggtcctgtcatagcaggactccagcgtgtccaggcaatccgtgcaggagtccacccgccggcgcgcgaccgctcgagcaagccggaactgcaagaccttactctcggtcgcaatgctgcgtgcggcgtcagccacagccttgggcgcattgtatttttgctcgctgagccaggccagccagtggtgcagcatttcgaagttggcgccgagctgacgcggaaaattgaaggagtacaggtggaaataggcgtcgtcacgcgccagcagggtatccatatgctcgccgaacacctgtcgccagcaggccaccgggttggctgcagggcgtctgcccaggtggtagcgcagcaggccgaccgaagcgtcgaccaatgcggatgacgcgagcggcgggcgcacgcgcttagcgcattcggcataggggaacaagatgttgccgttgccgctgagatcagggagaagccgcaacaggccgcgatagttctcctcctgcgcgctgtgatagccgaggccgtggtagtaccagaggcgctgcgcctggccgtcaatgcggtcaatggcgacggtggtcttgacgtgctcgcgccggtacgccgtggcatgcgtgtcgggcagatagtagctgtcggcttcgagcagcacggtgtgaccgcgttcgacctgggccatgacgtgcgcctggagcgtgtcgtagaccgccatttcttgcacaaccgtcccgtacagcgtctccaggtccaactgcggatacttgaagaaggtaaagtgatcaccctcaaagtcttgcgccacggtaaaagccagtcccgcgcgcggttcgagaccccagcggtggagcagttcgacccacaagtcgatgtagcagttggtttcctgccagatggcctcggcgctatgcagcgggtggggatccgcaatcgccggcagggtggcgccgaatccgccgccgccctcgctgcgtgctgtgcttgccttcatgtccggtcctccacatctgtcatgtcccaaggcgtggtctgccggcctgggtgtggactccaaatctagcgagttggccttcgctcttcggtgcgctctccaacagactcggaggcctttcggctgggtcgagagcggtgcagggagtgctccctcgagcggcggccaaatgtgagatagccaacggtgcgaaggcacacttgcagacagaattgctcaaagctccatccggattcgcgtgccaatggatggacagcgggccgaagagcaacgcaccgggagcacgacatggggcaaaagctatcaacagtgcagtcgctgcgcgccatcgcggcgacggcggtggtcgcctatcattcggccgccacgataaggatcttcgggtggacgcccggtgctctcagccatgcgagcgagtggggatggagcggcgtcgatattttcttcttcatttccgggtttgtgatggtggccacgacctcgggccggcttcgcggagcgcaggcggcaaaggatttcatggttgcccggctcatgcgaatcgcaccgatgtactggattctcaccagcctgatgctggcagtcgtgtgggtggtaccgagtcttaagaattccgagttcacggcgatgcaaattgtgacctcctatctctttatcccatacgaggtcaaagagcacggtaacgcctacccgattctctatgtcggctggacgctggtctatgagatgttcttctatgcggttttcgccatctcgatctgcttctcggagcgatgcatgcgttgggccttgcccgccttctttgcagggctttcggtactgtcgctcaccaggccaacgctatatatcttcaggttcctgacctcccccctgctgctggaattcgtactcggctgcctggtcgcctggctctacaaattcggctatcggatctccaggcgggcttctttctccctgatcgcggccggagttttcggcttccttgtgctgacccccggttcttcgatggaggacagagtggtctttgcgggaatccccgcggcgctgctggtttccgggatggtgttctgggagagcgccgagggctggataggaggtagctggttgcagggcattggcgattcctcatactcgttatatctgttgcaggccttcacggttccggcatttgcccggctgttctccgcgatggacaagcacagggtcttgccaggcgacattgcatgcgtgttgttggtgattgcgacgatgatggtttcgttgcttacttatcgacttgtcgagaaaagaattgacgcaaaactgggcaagcttcgccagggtcttcggagagttcctgcttccggtagcggaagaccggaagagccggcggcgcggccggcaggtcgagaccgaggggtatagcggaggtggcgtgcgttctgtggtcatcgccacatagcagtgcaacgttcgctttccgccgcaactatactgagccagcgtggcgtgtggcggccactaatgacttgcccggcccggcaagtgccggcgcggcatgcaggctccctcccccattcgacgcttaccccctctggacctacatgccggccattccaggaaggatgccgcctgccggtggcgctccttacgccgccgccctgacgggcgggatttctcggagcgaatgtgatgaagcgcatctttgacatcctcctggccgtgctggccatcctgctgctcgccattcctctcctgttcctgatgggcgcggtgcgcctgaggctgggcaaaccggtcttcttccggcaggtgcggccgggacttcatggcgaaccattccacatcgtcaagtttcgcaccatgacggatgcttgcggcccggacggcgaactgctgcccgatccggagcggctgacaggattcggagcattgctgcgcgccacaagccttgatgaattaccggagctctggaatgtcgtcaaaggcgatatgagtctggtcgggccgcggccactgctgatggaatacctgccgctctacacaccggagcaggcacgccgccatctggtccgtcccggtattaccggactcgcgcagatcagtggacgcaacgctatcagctgggaggagaaattccggttggacgtctggtacgtcgaccatgtatcggtatggctggacatggtgatcttgtggaagaccgtcaccaaggtcgtggcgcgcgaggggatcagtgccgcgggagaattctccgccccccgcttcaagggaagcaagccgagtgccccggatgtcgatgccgcatgacatgtcggatgctcgctcgagacgcaagggcgagtgaccattccatgatctggagccgccaatgcgattgtcctgggtgctgatcgtccatattggcggcgcttcactcacgttcccccttgctgccatgattgcgctgcggctggtctacctgggcttttggaggcaggcatgctattggctcctgtcgctgggggccggcgtggccgtcattcttgcagggaaactcgcgttcgaaattgggggatggtcaataccatcggcgaacgtgtacagcataagcgggcacgccatgcttacggcttcggtctacccggtgctctgtgcgatgctgggatcgacatggggcaggcgcacagccaggttcggcctgtttgccggtgtatgggtggcggtcgtggtggcggttgccctgattgtcggtcgctatcatacgctggcggaaaccctgatcggcatggctgtggggttgaccgtggcatggctcaacctacatccctttcgtccgcttgcgcgcgccggtcagacgccgatgcttgcccggctggcactttgcggcttcctggtccttattatgccggccgcgctgcatcctatcaaaactcgcttgtggtcccatgggttgctttggttcggtgtcaccgagcgctatttcagatccatcgacaccgatccggtttccggccggactgtggtgaatgtcgaacagtgccgtttgccgtcttaccgggcatgttctgacaccttctgagctgcgacgatggagttcaccatcactgatcacggatccggcgtgccgtaatctggtaggtaccggcagtgatgaactgccggtccttggcgttggcggagacgccggtgtgagagtcgacaacgcaatcggcaccgattgtcacgcctgggtagagcgttgcacgtgtccccaggaaacaccgcggtccgacggtggcgttgccattgaggaccgcgtgaggtgacagcacagagcatgcgcccgcccgggaaccatggccgatcccgctgaagacattggccaccacgccatcctccaccaatgcgccccgactgacgacagtgaatggaaagatcagtgcacccacgcccaggcgggcggaaggcgagacaagggccgtgctgtgtacatacagcggaacctcgatcccgatttgcaagagccaagacagtacgtcctgccgtgcctgggtggcagctatcgcgaccagcactgcctggtgcgacgcggggcggaactgacgtatcggtcccagatgcggcagatctatgccgtccggaaccttgcccggcctgtcatcgatgaagcccgctacaaccggtccgccgcacaatgcttctgcctgcagataatcatagagttccaccccgagcccgccggcgccggcgatgaccactgaagagacggcagacgcgtgaacgagtggcatggctgatgggccctccggtgaagccgtgtgaaagtcggcggtggtggcggccgacggctgggagacagccggggacgacaccgaccgccgctttagctaggcccgcttgctctgtccattgccgtattcggcgagatagcgatacttgccgaagtagttgtgggaccggtaccagcgtccctcgatcagaaggccgttgaagagcacgcccttgatgtcggcgccggcctgctggatggcccgttgcgccgcgatcaactcgtcggtggtggtcttctcggcacgcgcgacgaggaacactacgccagccttgctcgccaggatgctcgcgtcggcagcggcaagcactggcggggtatcgatcagcacgaggtcatagcgcgatttgagttgctcaagcagggaatctatgctggaagtcagcagcaaatccgccgcgtgtggtggttgcgtgccggtcgagataaagtccaggccgggcgccacttgccgctgcaaaacctgttccagcggcgcgcccatcagcagttcggtcaagcctggcccgcgcctggcatcaaagaggctctgcaggctgccgcggcgcaggtcggcatcgataagcaccacgcggctgccagcggcggcaatcgcggcaaagttcgcgcagacaaaggatttgccgacgcccggggcgggcccggtgatcatcaccgtccgactattgctcccagccatggcgaaacgcaatgccgtgcggaagctgcgcagactctccacggccgggtcgtccggctgctgtagtgccagcaggttgccgccggatggcagctctgactgctgcttgctgaaggggatggtcgaatagacggtcatccctgtctgcctctcgatctcgtccgcgtcggccacgccgccatcgagcatatggcgcatgaagatcgccagcaggccggcaagcaagcccagggccagcgacatccccgcaatcatcgcccgatcaggccgcactggtttgagcggcacatcggccgggtcgacaatcctcgcggttcccactttgcttgccttgaccagtttcagctgctgcacctcgtttagcagcgtctgaagcaactcagtgctgaccttgacgtcgcgcatcaggcgaagcacattctgttccacatccggcagcttctggatccgcccggatacaccgttcagctggccgttcaggccggcaatctggttgtcgatgagtgcgatcgccgggtgattggaggtaaagcgtgcagccagctcctggcgcttctgctgcaattcctgaagcttggtctggatctgtaccgactggcccaggatcagcttggactcctcgctgaggtcgatggtgccgcgttgattgcgcatcgcgttataccgggtctcggccacatcgacctgctgcctgagcagcggcagttgtccctcgagaaaggccagcgacttctcggcttcagcggctttgcggcggatgttctggtcaacataggcgttaccgatctcgttgaggacagctgccgtcatgtccggcgagattccctccagcgacacgccgatcacgccgctttgcttgccacgctcgctgatcgccagcttctcctgcaatcgcgtgatggccgcgccgcgcggcaggcgacggagtacgaactggacaccggggcgtccgtcgatctggctgaccagcatggtgaccgtcccggtggccgtgctgatcgtcaatggcgatcccaccttgccggtagcctcgacattgtcgctggcaaaccgcaccctgtacgcgtcgtcacccagcgcggtcaacgtgatcttgcgttcctccatgggcgctggcacgtcgagctgggccacggtgatcgattcatggccccacgcgaagccgccccatccaaacagccccgggtgcgacagttcaggattgaaattggcgattgccgggccaatcagcgggaaatagcgcggtgcggcttcgatatacagacgcaggtcgtcgaccgccttgccgactaccatccgtgagcgcaggagttcgatctccgcagaagccgcgggtttgacgtcgaaagccggcgagacgccggctgcgagcttgcctatcgagttaccgctcgagtcctccacttgtaccgtcatgtcggtgcggtagaccggctttgccaggatggcgtagatgagaccgaggccgatgatgactccggcgacggacaggaaggtccgtcgatagcgggccagcaaatcgagataggaggtgaggtccactgccggctcgcgctcgtccgcgccagcgggggcctggtatcgcgtaccgatcggtttcatgatgcctctccttgaacatgtgcgggtgcagcagcagcccccagccgtgtagaccatgatgcgatgccctgcttgatcagttccagcacgatgccgaacatcttcggcgagcatccatacggatccggcacatccgtgtgcgtatattcgcaaagccggtgggttttcccgcgcgcgtgcgggaaaacccgctcgagctcgtcgcgttgctcgctgtccatcacgaggatcagatctgccgccgccaccagtgcgtcatcgacggcgcgtgcgcggtgaccgacgatatcgaacccctcgcgtgcaagcagcctgacagcgttcggatcagcgggggcgccgaccggcggtgcgagcccggcggaaaccacctcgcaagcaggcaggacatggcccagcaggcaagccgccatcgggctgcgacagatgttaccgatgcacaccaccaggattgagtgaaccatctctcgcatcccactatttgaatgccgtggccgaactgaaaacgggctgtgtactcggcagcaactggttgatcacacggctccagcggaccacttcgcgtgcattcacataaaccacgtccttcggttccagctcgaagccctcggcgatagccagcgccgccggagagttgccatccaggtggaagacattgggctcgccatccaccgccttccgaatcacgtagatctgctccgcattgccggaattcggattgaccccaccggcatcgccaagtgcctcgttcagtgtcatccgcccgttgcgcatcagcaaggaagccggacgcaccacttcgccggtgacgaagatcttgttgtcttcgcgctgttccacgcggacgatgtcgccggagcgcagcagaatgcgggatggatcgatgcccttggcgagcagcgcggggatgttgacataccagctgcgctcgcctcgggtgatacggatgcggctgttgtcaccggtcagattcagcacgccgccggcgcgattgagcgcttccaccagagtcatgggcgcgtcgtcgatgggctgcatgccaggcagcttgacctcgccgtcgacatagacacgctggctgcgaaagccaagcacacgcacggtcatctggggattcctgaccactcgcgatagcacacgcgccatctggtcgcgaacatcgtttgccgtctttccggccaccttcatgacaccggcgtaggggaactgaatatcgccatgtgcgctgaccacatagccaggcacgttggcgccaccgctcgacgaagggatttcgaaggaggcgccgatgctgtaagtctgcgtgggaaagaccagttccggatggtcccataccacgaccgagatgatgtcccccgggccgatacgataaggctgcggcgttgcgaacagttcctggacccgatcgttgtccgtacgggccttgttgcgttgcgctttcaccaggtccagggtgatcggcgtgaccttgggcacgacttccggcccgatcgcgctcactaccgccttgttatcgaagtacatgccgggcgatgcggcgcaagccgcaagcagggcggtggccacaagtattgtcagactggtccgagattgaatgcgccaattgactggtctcacggcggtctccttgctgatagcagcggacatcgcaccgcacatgccatgtcccccgacgaatgcatagtaggagcggctgctccatgcttcggtgcggttgcgcacagtaagtacatgcacgtgagagccgcgcttctgcgagcgccaggccgctccgcgccggcttgcacgccggtcttcgcacacaccccttcccggtgatcgcggcatggccatccaactcaaccacgccattgcttttgctcctggcgctgacccaatcactaaactgtggcttcgcatgcttcgtccagcacgacagccagacgctgcgccagctgctggaagctgtggttgcgttcgacgtactcccgcccggcgcgccccatgcgcaggcgggcctcgagcggcgccgcggcgatgttgatgatggcatcggccagtgcccgaggctgctccgcgccgaccgtcagtccggccgccgaatcggccaccggattgttggcggcattggaggcgatgacgacggggcgggccgcagccaagtagtcaaacaacttgttcatgctgatcccgtaccggtacagccgcggcaggtcgcgcacggcgatgacaaaggcatccgcctccatcgccacggcagggatgcggaatttcggcaccgggggctcaaagctgacattgctcaagccgagctgccgcgcctgctcaatcagtgcagccttcatgcggccatcccccaccaggcgcagcacgatgtgccgtccctccggactcgattgcaccagcttcatcgcctgcagcaagttgtccaggccgttggcctgcccgtgggcgccgaaatacatcagcgtgaatcgcccggatggttccccagtgcgctcaggcgtgggcgggaacagcgaaaggtccacgccattgggtatccaggtgatgcgctccctcgggatgccgagcggcgtgatgtactcccacgcatgcggcaacagcacaacgatgcgagcggcacgtcggtacaaccacgtctccagcttgcgcaatgcccaggtcaggaagtccccttcacgcagacggcccatgtccaccagtgtttgcggccacaggtcgcgcacctcgaatacgaatggcaccttgaagcggcgcgccagcagggcgcccgccgccgcggcaaagggatggacgctggagccgatcaccacgtccgggcgcggcaggccgtgcgtggtgcgccgacgcaatacacgccaactgtaggccagcatgttgagcattcggccggcgccatcgccttcgtatatgggcgtgcgtacccagaggaagggcacatcgcgaatactgtccaggcgcgacaactcgcccgcctccagccgcttctcgccgctgccgatcgcggtggccgcgatgacggtcgcctgccagccagacgagctcaggtgctttgcgagatggaagtgtctcgtgccgcctgtgccgccgggctcctgggcatagtgattgagaatccagacatgcttcatggatggacgggatcgttggatgctggcgcggatgtcatcggcagagctcgtccagttgccctcccggtctggtaggtcagcagagcaatgcgggcccgccaaggacctcccccctcgcgaccacttgtcgccgcacaaggacatggtcacgggccggaaactggaataccttgccgtcgtctgcggcgtacttgccaatccggtcaaatacatctaatcaaagtccgcagctaaagggaagcgcatagcgtggcccggcccacactgctcgacggcgcaccgtagcaagctcaagacagctggtccaccaggtcaacgtattcgctttgcgttcggcgtcgcacccagcgccattgttagtgcactgcgaagtcccgataattttctcgactggcccaatcctgtgagtatcggccattcggcttgcgtggcgccgatccaggaccggctcgtggaactgacagccatcattcccatcggagcattggcatattcacactggaaatctgaatgaggcatatgaccccggaagccctttcctggctacagcggattctggccgagcgattcggccatggctttcacctgcaagctgctggcgcggactttgtccacctgtgccttgctggttccggccagaggtcgattgagattgccgcagatcccggcaccttccggcgcgccgactctgagctcgccttcacgagctgggacgcgcttgccgagggttggcagccggccctcggcagtcccttgccagcgccaggcctcgcgcgcgcaccgtcaccgctgatcgaggcgaccactaccggctatcgcatccactatgacgttctcggtctaagctactggatgctgtcgcgccaggaggaggtcggccgctccgacctcgacagctacggtcgtttcccggccagcgcgtcgcatgccgggaaacatggctatctggagcggccggtggtggacgaatggctgcatatccttggccaggtgatcagccggctatggcccgaactgcagctcaggcagcagcgggccagcatgaaggtgtcgcatgacgtggatgtgcccagccgctatggctttgcctctgcggcgagaatcatccgccgcatggcgggcgacatactgatacgccgggacgtgaaaagcgtgctgcaggctcccgtgatacggcttaagacccggaccgcgctgcatccgacggatcgggtcaataccttcgactggatcatggatgtttccgagcgccatggactggtcagcgctttctacttcatctgtggctgtaccgaccccagcaaggatgccgactacgagcccgagcatcccgccatatgtggactgatgcagcgcatccatgcccgcggccacgaaatcggcctgcatccgagcttcaatacctatcgcgcccccgaaaagctccaggcggaagcaaagcggctgcggcggatatgcgagcaggagaatatcgaacaggaagcatggggcggccgcatgcattacctgcgctgggaacaccccaccaccatgcttggttgggagcaggcaggcatgacctacgacagcacgctcacctacgccgaccacgccggattccgctgcggaacctgcttcgagtatccggccttcgacccggtcgcgggaacggcgctgaacctgcgcatccgtccgctgattgcgatggaaggcagcgtcattggttatatggggcttggaaccggcgaagcagcctggaagaagttccgggaactgaaggatacctgcaaggcggtgaacggctgtttcacgatgctctggcataactcatcgctcggcagtgccgaagaacgggatctgtaccaggcggtgcttgagcactgaccagccatcgcattggcaagcagccggtccgcacccgccagggccgccctcgcccgcaggcgaacagcgccgcgatgcttttgtccttcagcgcgagccgccacggcgaaccagcgtaggccagaacatcagctcggcaatcatacgcttgctaggaccgtagcgccccataaagctcggaaaatacgccgcgacgaagtcccggtcgtccacgcttgccgactgcgtcagttcgtacaagcgcacacccagcgcatgcagtccgggccatgtcgcatagccaccggtagggaatgactccgcctggccatagggtgggtagccctccgagcaattgccggtgccattgtcgtagttcacccgataccagccattggcgccgctgaagtaattggtgaacagcgggcggttccagtcctggttccacacgtgaagacgcagctggcgcgcaaaagcgaccatgctgtcgtgcgagggcaggctcgacggggagatgccgtatacccgcaccatctctgcgcgattgcgctcgatggcttcaaagaaatgcaccagccggcgcgcatggctgatgtcccagccgaggttggcaaccggcgcgaagcgctcggcagggatttgcgtctgcgccacgaaaacatcgggcctggccggatcgcgcttgcacaccaccggcttgtcgcgcccggtgtagcccgcgtaccggttgtcgtcatagagccgccagaatcccgcgtcgaggtcagccaccatggcgctcttgccggccttaccgttcgctccgggaggcacctgtacagtgatacgcgccgcaaccaggcccagcagcaagtccaggtgcgccttcatggtggcaaagccggcatcatcctggtccagggcaagcccaggccgcacggccagcatgccggccagatccgcgtagatggagatctgccaaagctccttgtcggtcaggaacagctcggacgagccattcttcacatcttccggccgggcggcgatctgcttgcgcaacgcaccctgcgccgcaggggtactccaccgcaccaggtgctcgcgcgcgatgcgcgcggtctgctcgacaaaatcgccgggagcctcgggccgcgcccggctcaagctgttggcaaggctggtcgcgaatgccaggaactgcgtgctgctgagcatcacctcggtgttgcggagccggatgttgtggctgcactcaggaccgccacggcatatccatgctcgccccggccggttgccgggcgcaggctccagcttcgcgtacgtgctggagacgagttcggccagctggtacagccggtcgatccgctggcaacgttgcgccatggccagcaagttgtgaaagtagatctcgaaatggtatagcgcgtaagtatcgcctgctgccagtcgttgcgcgatcagctcctctcgcacgaaggcgaggccgccttggttccagcggcgccagacggcgtactcgatcgggccgtcgcagttcagcgcgtcgggcatcaggccgccggattgagcctgcgctgccggcacagtgctggccagcagtacaacaaggccgcaggcgcccagtagcgctgacgcaagacggcggcggacgagcctcatgccagcatctccttgtgaacgcgcggctgttcagcgccgatcgtggcgaccagccaccacgcctgactggaaaaagggcagagcattcgatcgcgcagggctctctatacttctgctggttgcacacccgaatcggcggccgagaagtgtcggcatacctgatttccgttgtccgtctccagactagcggatccatggcaggcgcaacatcgtgcggatggcgatcagccgtcggaaggacgatatcgttcagagggatggagagcggacttttgtcagctctgcttcgcggctgcgcacccctgcctgtgtcagggatggcgtgcttgtgcgccggcgcttgtctagtgcgcaagccgtcgcgccccacgccagggcgaagatcgggtcgttgacggatttggcggtggccgccaacgtcactgcatagaggctgaaggccagcgccagtgcaacctgcggatccgatgcgccgccctttttggccagccaggccgactgtaccaaggcacagcccagcaggagtacaaagccaagaaagcccgcgagcccgtagctgacccaggccgaaagtgcgttgtgcgcatagcttcccatttcgccgatctccatctcggaagcatagcttccaagcagcggatgctccatgattatcctgacggcgtactgcatcagttcgcttcttgcctgataggaagccgattccttgatcgccagaagctgcagaatgcgcgagttgccctcgaggatctggaaactgatggcgagataggcgataccagcaacgcccagcggaagccagatcagcgtggtccgcgacgcgccttcccgaaccaccatgagcattgcggccaccacgaggaatgccataaactcggaccttgcccctaacaggaacaataggggtacggcaatcactgtaatcagtgctgctcgcaatcccgcattcatcgcgagcaggaccagggcgacaacggcggcagaacgggccagcccctgatagcccgagacccgcaccgcatcaccagcaagcctttcggtatcgtagaactggccattcgattgccatgcggcgatcgccaggaagtagaccagtgaaagggaaagtatccagcgcagccacttcccgtccagatcgaggctccgtactgccgcgtagaccaccagccaaaggaacatcgcgccgaggttatacaaatagacggcgggggatccctgcgcccccatgccgagcaggaaatgcaggcttgaccatgccacggcaaacagcaaatacagcatgaaagcttgatcgataaaaagcgaccgttcgcgcccgactatcatcgcgccggcgccgagtgccagcagcgggacaccgagcacgaccgacatcgggccgaagaagccgcccagcaccggcggaaagaaaccgccagcaaccgcggtgtgatagtagaagtaacccggaaagagggtgacgaagaccacgccggcgcagaatgagaggtacctgcgcttcatgattgccttgttgcctcccgtgttggtcgtcaattcggacggaattcccgatcgctattgcatccgtcgcggtttatcagccagtggaagtcgctggcgtacaagccgcggacagtgcctttccgcatgcaaggcccggccacggatgtctgctgccgtcctatccatctaatcaaagtcgccgctacttttgtagcgcagtgcgtgtccaacccaacacacagcggtatggcagcccggactggaagggtttgcttctggcggaaaatccggtccgctctggcgagcgcggttgcgcaggcgggcaagcccgctggcacacgcaggacgcgccgcccggagtgcacacagatgggcaacgacgcgtcggcgacggacttcacgccagaagccgttcatagaattgcaggagcttgtcttgctcgatcgcccagttgtatttcctgaccacgttgcggcggccgttctcacccatgcggcgcgcctcatgcgggtgcgtcaccagatagtcgacggcgtcggcaatcgccttcggatccagcgggtccacgcatatgccgctgtcgctctgctcgacaatctcacgccagagcggaaagttggaggcaatgggcggaataccagctgccatgtactcgaacatcttcaccggcaacgcatcgagaaaattgatgatcgggtggagcgtcaccaggccggccactgaccgctccagcacggcccgcaccccggcccggtccaggtacccgaggtcgttgacgctggaccagccggtggtcgccctgacctcggactccagggcccggtcgccgaaccgtcccgccagattcagtcgggccccggatcgcatcagctccagcgccatgagggtctcgcggataccgcgacttgagtttatgccgccgagatagcacacttctgcacgcttatcttcccagcgcacgggaccgcccagttcgtcgagtatggggaaattgttgatgtcgaccgtgcatggattaatcggcaggaacttgtccctgatatagggtgtggctgccacgatgccgtcgaatctgcgacagacctgcctctcatacatggaaaaggcacccgcaagcgctcgtaagcgcgtcggtcccaggtagggcttgctgagcaattgcttgggcacatcttcatgcgaatcatagatgacacgcttgcccatgctcttcagcctcaagccaatgggaatcagctccgggtcgtgcaggtggtagatatcagcattcagcttgatcgcccggcgcagaacgcgcgcggtggtcctgaagacgcggttcacacgccccggcaaggtgccaacatcggtgatgagcaccccatcgcggctttcgtccccgttgccgtcggccaccaccagcgagacccgatagccattggccgccaggctacggcaatgcttgagaaagatgcgatcatcgtagcgtggatgaacggaggtgaggtgggctacgttaggactctgcacttcttctgctccgtttttactccgttaacatcgccacgacaccctctgaaaaaagggcggccgttttgctcgcgggtcgaggcttgacgccggccatcgcctacccgagaacaaacgggcatgcttgcctgaagatgggagcgtcgtcgcactcacttgcatccagatcgcgttgcggcaattgccttatgtccatcgttgtcgccctttcatgcccgaccggtgccggcgtgcggcgcgcgcaaggcacgccgcagccagagtgccgagagcgccaggaagtaaatcgcgcaagcaagggagcgccagtcgggcgcgccgctgtacagcagtaacgacggcagcgccaaggcgcagaagatgaggatccgcttcgtatcgtgcgccaccattgccctgagacctacccctactcgcgacatgaacaaggccagcatccagagataggccaaggcgcttaccaccgagaacgcggcgatgctttgatccgccggaacgctgaatccgtaacacgccgccagcgtggccagacgaactgcgaaggtgctgaactgcgcggtcagctccagcttctgcagttccatcacatcaggcaggcacgacagcggggaaaactggaactgaaaatagatccagggtgccatccagcgcgcatagtggccggccatgcgccaccgttcaccgaacacggtgccgaacaggtccggtccggcgcagatgagcagcaccagcgccgggacaccggcgttggccagcttccggcgcagttcctcggccacctccggcaggcggcctgcccgcctggcggccggggcctgggcgaagaagacgctgccgatagcggcgccgatcagcgtgatcggcgctgacaccatgcgcagtgcaaaggcaaagtggcccaccacggcagcaccgaacaatgcggagaagatcaacgggaccaggtgtaggcccgccacattgaatacggccgtccaggtggaatacagcggaaagtccttgtagcggcgagccagggcaatgattcggaccagcctgatattgcggccctgcctgcgccggacttcccttatcaggaagaacagtccgccggtgccattgccgatcaccgttccgcccatcaaggcaaggacgccgagtccgtggccgcccaactgaaccagattcccgatcaaggaccgcagcagcctggtctgcgccagctggccgaagtactgcatcctgaccatccatctctcaatcacagtgtagaggccggccgaagcaacgccgaagggaagcagccagagaacgttggtgtcgatcgaccaattcagggccaggatcagcgcatcgccgaaccacagcacgccgagcccgcatagcgcggtagtcgacgcaacgcatagcaggcacaacaccaccaggttctcggcatcgcgatcgttggcgggtagcgcgatcgacaagtcgtagcgcaggcaggcaacaacgccgaagaatgccagcagggccgtgaagaccgccgcggcgccgaaatcctgcggtgcataaaggcgcgtcagaatcggcgctgccgcaagggtgagtatctgcgcggtggcctgcccgccgaccagcaggccaacgctcctgcccacgcgcggcttcgccgccgcgttgggctcagtggcaagcgtttgtttgttcaaggcaaaactcgctccggctggcacatgacatgttggagaatcgccgaacagatggcctgctggctcgtcatgtcgaggtaaggatgcatcggcaggctcaacacctgccgcgccaatgcgtcgccgatcggcaggcgggcatggggagtggccaccgcgggctgtcggttcagcggcagcggatagtgcacgacggtggggatcccggcggccctcagccggtcctgcaaggtttcgcgatcgggcacccggatcgtgtactgcgcatacacgctgatgttgtgtggttcgatatgcggcgtggcctcgattcccccgcggcggaacagctctccgtaccgcgccgccacttgctggcgcatcgccacctcctcatcgaagattgacagcttcgccagcaggatggccgcctgcaatgtatccaggcggctgttcacgccaacgcggacatggtggtagcgccgctcctggccgtgatgggcgatctggcgtatccgcttgcccagctcgtggtcgttggtaaagatcgccccgccgtcgccatagcagcccagcggcttgctgggaaagaagctggtacaggcgatcgtggacagattgcagctgctgcggcctttgtaggaggcgccgaagctctgcgcggcatcctcgatgaccggtacgccgtggcgcgcggcaatggcattgatggggtcgaaatcggcgcattggccatacaggctgaccgggacgatggccctggtgcgtggcgtaatagcggcttcaagtgccgccgggtccaggttacaggtgcgcggatccacgtctacatagatcggctttgctcccagcagcgcgacggtttcagcggtggcaatataggtaaagcccggcatgatgacctcatcgccggcgccgatccctagcgccatctgggcgatctgcagcgcatccgtaccgttggcgcaactgatgcaatacctggcgccggtatagtccgccagccgctgctccagttcctcgacctccgggcccaggatgtattgaccgtgcgccagcacctgctggatgccggcgtcaatcctgtacttgatgcgggcttgctgggttttgaggtcgatgaactcgatcattgctgatctcctctgcagacggcattcgggcaagcctggccactgtcccaggcacctcaggcacctcaggcggcagccttgcgcagcgtggcgccatccaggacgtagcgttgcccgctgttcgggcagatggcctcaccctcaccacgcaccggcaggtcgagctgctcgccgaattcgctcatccagccgatctgacgtgccggcacgccgaccatcagcgcgtaggcgggcacgtccttgttgatgacagcgccggcgccgacgaaggcatattcgccaatcgccacgccgcagacgatggtgcagttggcgcccagcgtcgcgccccgcttcaccagagtgtcgcggtactcgcccttgcgctcgatcagcgagcgagggttatatacattggtgaacaccatgcttggaccgcaaaagacgccatcttccagcgtgacgttgtcgtagacggagacgttgttctgcaccttgacgtggtcgccgatgacgacacggttgccaacgaacacgttctggccgagcgagcactgcctgccgatgcgcgcgccggcgcaaacatgcgcaaaatgccagacgcgcgatccgtctccgatctgtgcgccctcatcgatgacggcagatggatgtatctggtaggtcattagagcctcaggcaagaagttgctgcaagaaaggatgggcttcgccgtcgcggggcgctgccgggcgtgccgagcggatcgcattgaccgtttcaatgcagtggcgcgcgtcatccaggccgtagccccggcccgcaagtacctcccggtagctgacggtgtgcaggtcggtgaagccttccgagaactcgatctccgcgccgtccacggtgatcgagcgataggtcggcttcctgcctttcaccgccgcgggcaagtcgccggcatcgaccgacaggaaccagcgcacacgcgcattctcgtactcgaggtagccggccgccttgttgtccgtgctgtggtgcacgacattgtgctgcaccctcccgaagatgaagtgcaacatgtcgtagaagtgcacgccgatgtttgtggccaggccgaaggatttgcgcgtgtcgcccttccagctctccatataccacttgccgcgcgaggtaatgtaggtcagctcgacctcgtgcttgtgcccgttgcgctcacggccgaccttgtccttgaggtcgaggatggcctggtggtggcgcagctgcaggatgttgaacacgcgccgaccggtctctcgctcgaccagggcaagctcatcgagcaactcgggcgtcggtaccagcggcttttcgcagatcacgtcacatcccaggcgcaagccggctgagatatgagactggtgcaggtagttcggcgagcagatggcgacgtagtccagcgccgcgccgggctggcggcgcagtcgccaggcatggtcatagaagcgctcgaactcggtgaaaaactcgctctggggcgagatgctgtcgatgatgcccacggaatcattgatgtcataggccgacaccagctggttgccggtatccctgatggccgtcatgtggcggggcgcaatgtagccggccgcgccgatcagtgcgaatcgcttcacgatagcgctccccgtatgctcaggccttgacaacattggcttctggcgagcgatacctgccgcggctgtcgacgaggagctttgcatgctggcggatcagaagatagtcgaagctatcgtgatcggtggccagcaccacggcgtcgaagccacatagcgattcgccgtcaagcggcacgctcgatagctcgaaatggtgttcgcgcatcttcggaaacacggggacatgcgggtcgctgtatgcgaccgtcgcgccccgagcgcggatcagttccatgatctcgacagagggagactcgcgcatgtcatcgacgttcttcttgtaggcaatgcccagcaccagaacccggcagcctttgagcgccttgccctgctggttcagcccctccgtcagccgggcgacgacatattctggcatggccttgttgacttcgcccgacaactcaatgaagcgggtatgcaagccgtactcgcgggccttccaggtcaggtagaaggggtcgatgggaatgcagtgcccgcccaggcccggccccgggtagtacgcggtgaaaccgaatggcttggtggaggcggcatcgatgacttcgaaaatgtcgatccccatccgcgtggccacgatcttcatttcgttgaccaggccgatgttcacggcgcgatgaatgttctcaagcagcttggtcatctcggccgccttggtcgaactgaccggcaccacacggtcgatcgccgcttcatacagcgcaatgccgaccttgcggcagcccggcgtctgtccgccgacgatcttgggaatgctgcgggtttcaaacttgccattgcccgggtcctcgcgttccggcgaatagaccaggaagatgttgttgcccacctccagcccgccttcctgcaagcgcggcagcaattcttcctcggttgtgccggggtaggtggtactttccagtgataccacctgcccgatgcgcaggtacttcttgatggcatccgtcgtattgatgacaaagctcatgtcgggttcgcgatgcttgttgagcggcgtcggcacgcacaggatgattgcatcgcactcgcccacgcgctcgaaatccgtagtcgcctcaaatccggtctcgcgggcatgggcaatgccgcgtgcggggatatgctcgatataactctcgccggcattgagtttgtcgaccttgttcccgtcgatatctatacccagcacgcggaatccaatcgcacagtagcgcagcatcaaaggcaggccgacatagcccaggccgacgatgccgataatggactcccggttcttgatccggtcgatgaggtctttggcgattgggctcggcatggtggaatctgcttcgttgtggtgaatcgaagaggacgataaggtcggaccggcgacgagatgacagagctgggcggatgacccgtgttatcgattgtaggagtccgtatatctccagacgggtgaagactgttgtgacccacacatatgcgggcaattacatgaaccatttcctgtcgctaattccggcgtgcccagatgtcgctgccaacactaatggaatcgaagtcgaaagcgacatcgttctgacggctatcgtccaatcgatggagccgtgccgcaccagactgcatgcgacgggccacttccaatcaatgtgcgaaggcgcaccgatgccggcgacatggctttctaggatgcggctatcgtgggatgggtgctgcggcgaatgcgtgagcagcttgcatgacgcaatgcgcagtaaacaagagcgcaccagcgtcagcgtgtatccgtactatctggtcaatgagcaaaggggtagtgccagccatcgtcacaggaagggaacatgaaagtcgttaacatgcatggcagcgttccggatgccggggacgaggggcgcgacccgctcgatttgaccgtccatgtcgatgtgctgttgcgctaccgctggacctttctcgctgtggcaggcatgttcatctgtgtcggaatgctctatgccctcctggcgacgcctctctatcgcaccgacatcctggtgcaagtggaagacatcaatggcgatgccagcgctggcaggctggcaaccaacatctcgccgatattcgacgccaagctggttgcagcggcggagattgaactgctgcggtcccggatggtggtaggaaaggcggttgacgacctgcgcctcgatatcgaggccgcagcacgctatttccccctgatcggccggggcctcgcaagcttcagttccggcctgtccacgcccggcctgttcggctggggcggcttcgcgtggggcaaggaatcgatcagcgtggcccggctcgaagtaccgccgcagatggaggggagcaagatctacctcaccgcgctggggggcaaccagttccgtgtcacctttgacagcgacgataccaaggtgacgggcaccgtgggcttgcccctgaagattgctacgggacgcggcacggttaccctgctggtcagccatctcgatggccgcgccggctgcaaatttgtgctgcgccgcctgccacgcgccaccgccattgccaggctgcaagaacagttgatgatctctgagcgcggaaaggagagcggcgtgatcggcgtatcgttgaatggcaattcgccgacgatgatcgcggccatcctcaatgagatcgccggtgcgtacgtcgaccagaacgttcgccgcaaagccgccgaagcggagaagtcactcgccttcctggagcagcaattgccgcagcttcgagagcaggtcgaggaagccgaaacccgctacaacgcgatgcgtagccagcgcggcacgatcgacctgggcgaggaatccaagctggtcctggttcagtcgatgcagatccagaccaggctgcaggagctgcaccggcagcgccaggagctggccacgcgctttaccaacggccacccggcacttgaagccatcgatggccagatcggtcgtctcaacgcacagatcaatgccattgccgggcagatccagaagcttcccgacgtcgagcagcacgtgctgcgcctcatgcgcgatgtcaaggtcagcactgaaatgctgcagtccctgctcaatgacatccagcacctcaagctgatcaaggccagcaaggtcggtaccgcacgcctggtcgatcccgccggcgtgccggtcaagccggagagtcccaaccgcccactgatcaccggcctatccatagtactcggcctctttgcgggtctactggtgatcattgcgcgccactcgctggatggcggcgtcaacgacgccgacgaggtcgagcgacagactggcatgaccgtctattcgaccattcccttcagcgcacagcaggcacaggtgcagtcggcgggcatggaggatgcgggcctgctggcgcgcgtgatgcctaaggatcctgccatggagagcctgcgcattttccgcaccgtactgcagtccgcgctggcaggcagcgacaaccgtgtcgttgtgatcagcagcccgtcgccgggcgtcggcaagtccttcatctgtgccaacctagccgccattgccgccagcggttgccgcgtggtgctgatcgacgccgacctgcgccgcggtggcctgcaccattgcttcggcgtgcagcgcagccccggtctggccgacgtgctgatgggcatgccgccggaccgggcgttgcggcgtcaggtggtgaagggccttgatttcatcgcgaccggtatggaagcaccgcacgcggccgacatgctgcagagcgcgggcatgggcgccctgctcgatgcactgaggtcgcgctatgacttggttgtgatcgatacgccaccggtactggctgctgccgacgccggcattctcgccggcaaggcagacgcggtgtttctggtggcgcgcgcggaaatgacaaccgcgggcgagctgcgggcctcccaacaggcgatccgccgggcgggtgccgaggtcgagggcgtgctgttcaacggtccccacgtccagggccgctggtatcgctcgcacaatcactacggcaagtaccgctatctcaacgagtaccgctgcgcggcgaagcaggcctgagcgcggcacgtggggcacccggcgtcaggtagcgcaactttttgccaatccgtctcctggcggccacgagttctgcgcaacggttctggctgttattttgcctggcgaaatacaccgcgagccatatgtaatgctgcgaacaaccggtttgagatgttggagaacgtgcgttgctgtcctccgcagcttcttctcaccgattcaacagactgaatcatgctgccctcgaaatcaaggcagtttaatttcaactcgttccgggtatattgaatggcatcccagattagttttattccggcaccgcttgtgcgcagcttcgggtcctcgccgaccatgtggacataagaggacttctggtcccacgttaaataaagcgcggaatgtatctggttgtcatcgtcgacggccatgaaaatctttcttgcatttctttccagcaaggcttggtcgtgtctttctataaagccaaaggaatatggcattttcatgccctggcgatcaaaggtctttttgttgatggcgtagaattctgatacatcattggtgaagcgtgttttgacaattttctctgctttgcgaatcttgttgcgcgcggcgctgttgaaccggctgaagacaccgtccagatcggcgatgtcatcgataacgtaagtgtaacgtacagcctcggaaaatcctttccaatagaatggcaatagatttctgagggaatgatgaatattgaagctaacgacatgtgattttgggagcagtgccacgatttccctgactgcctccatttcaaaatcaatgcgattgtgctcggatatattcgacggataatttagccagagctgaaagctttgcgtcaactttggcatcctttgaattatgagtggccccctgcgttcggtgtagtaagggagtgcggcaattggcttgttattcttcatgacaatcgccgcgtcccattcgccattctggcagaccgagtcaagccaccagtctttggatgagatcgctatctgcggattttccgagcatatggtgcgatatgccttcctggtctcgctttcagcggtgatagctggcacgggcttggtttggctcatgattcctcacaacgctccatagttggtttctctcagaaacactcgccttgagatattgcccctggcggccccagcatttgcctgcgaggccttccttttttcgttaaaggaattattcccgcgtggtagtgcggtcgcaacgggcccgcgtgtgtcagcgaacgcaggattggctcgcactggctcatgccggtcggcttcagctcgccttgcttgaattcgacagtgttgcgagttgcgggtcggtgccgatctccgggggcggctgctggcgcgatgcaaccccgcgcagtgcatgctgcaacggctggctcggctcccgctgcgagggcgccgccaccttgcggcccggcgactccagtgagctgtacggcgcgtactcgactaccaggctctgaatgacggtctggatctcgagttcgtcacgggtatcgcaggcggcaaagaggcgctcaagcatctcgtgcaactctgcctccgcgatgagcggttcgttcgagcacaagatgcgctcatgctcgctggccgtcacctcaccaccgatgaggagctcttcaaacagcttctctcccgggcgcagccccacgaccttgatctcgatgtccccggcggggttcttgcgcgtcttttccgtcaggccggacatctcgatcatcgtgcgggccaggtcgatgatgcggacgggcttgcccatgtccagcacgaagacttccccacctttggccatcgcgccggcctggatcaccaactgggctgcttcggggatcagcatgaagaagcggatgacgtccggatgcgtgatcgtgacgggcccgccctcacggatctgtttgcggaacagtggtaccacggacccggatgagcccagtacattgccgaagcgcaccatcgcgaacgttgtccgcgtgttggggcgcgtggctgcggcttggaaaacgagttccgcaatgcgcttgctggcgcccatcacgttggtgggccgtaccgccttgtcggtggaaaccagcacgcaggtctgaacgccgaaatggtctgccagatcggcaatggtcagggagcccagcacattgttgcggatcccttcgggcatgttcttttcgaccagcggcacatgcttgtaggcggcggcgtgatagatggtgtcgacctgctggccgcgcagtgcggctgacacggcagtggcgtcgcacacagagccgatccgcgccgtgatctgcaggtcagggtagcgctggcgcagttcctgttcgatcgcgtagagggcatattcggagtggtcgaagagaattaggcgctggggttcctgcgaagcgatctgacggcacagctccctgccgatggagccacccgcaccggtcaccatgaccgtcttgcgttgcgtgcatttggcgaacaggtctacccgtggcgggacgatgtcacggcccagcaagtcttccacgctgatatcccgaatcgattgcacggtgatcttgcgatccacaagctcgagaagagagggcaacgtgcgcacgctgaccgaatagcggtgcagcttgtcgacgatctggcggcggcgctcgattggcagggacggaacggccagtacgacttcattgatggcgtgccgctggatctccttgcgcacgtggttgctgtgatggactggaaggtcggcaacgaccttgccctccagcgcgaagtcatcgtcgaagaagcagacggccttgtggcccaggctggcgcgcatggcgatggcgagctggaagccggcctcgccggcgccgaatatccccacgcgcaagctggcgcgctcgttgcgggccagcaggctctgccgcgtgcgcgtcagcaaggcgcgcgccacgaagcgcgagatcacgacataggaaaaggcgatgaaccagtagatcagcaggccggtgcgaggcagccggtcgaggtgcatgaggaacgacagcgcataggtgagtccgacgatgccggccaggctggtgccggtggtccaaaggactttcaggtcgaaataccggacgacggtccgatacagtccgctgagcgaaaacacgggaatcgtgcaggcggcaatgatcagcggcggcgtgatgccgtactgtgccagcaactcgaagttgccggcgcgcaggaatagtgcgaaagcaaagcacagcggcagcgcaagcaggtccgccgcaatcatcagcgcgactttgcgacgtcttggcagggcaatcagccagcgcgagagcggtttggtcattggccggaacctccgcgcaccagaacgggcaggggcctggcggcgaccaggctgcgatagggacgccccatttgcggggcggacaaagaaggttgcgcacggttatgcattgtcttaaggcttcttctatgggcagctccaccggctggtggcctctggaagggacatgccctttcagaggcttccgatttgcccgtttacccgtcagcgactgggtgctttcgacaccattcccgactgaaacaattattgttgttggtgcgtccctggcaacgcagcagcgtgggtttgcgtacgcagcggcaggtggcgcaaagggcgtggcgcccgccgcgccctttgcgccttagttgagtgatccaggccacatggcggccttcacctgcccatgcaagtctggttagatggatgcgttcccggtacccggtcgggttcgtgcagggcacccgctccgactttcattactgaggtggaccaccatgctggataccagtttttctccctggccaagtttcactgccgacgaggcggctgccgtgcagaaggtgctgctgtcgaaccgggtgaactactggaccggctctgaatgccggaagttcgaggaggaattcgccaggtgggccgggacgccctatgcgatcgcgctggcaaacgggacacttgcgctcgatgtcgcgctgaaggcgctggacattggccttggcgacgaggtcgtggtgacgccgcgaacattcatcgccagcatttcaagcgtggtgaatgcgggagcaaagccggtatttgcagacgtcgatcttgcgagcggcaatctttccgcggtgacgatcagcaaggttctgacgccaaggacgcgagccgtcatatgcgtgcaccttgccggcataccctgcgacatggacccgatcatggcgctggcgcgcgagcacggcatcaaggtgatcgaggattgtgcccaggcacatggtgcgcgctacaaagggcgttcggtcggctcgatcggggacgtgggtgcatggtccttctgccaggacaagattatgaccaccggcggcgagggcggcatggtgacgaccagcgcgagggacctctggctgcgcatgtggtcgtacaaggaccatggcaagagctgggacgctgtctatgagcgtcagcaccccccgggattccggtggttgcacgaatccttcgggacgaactggcgcatgatagaaatgcaggcggtgatcgggcgcatccagcttgcgcgcatgaagcaatggacagcgcagcgcactgccaatgcggaggtcattgccggcgcgcttcggcaatgtgctgcggtctggttgcccgcctgcccaccggatgcacaatcagcctggtacaagttctatgcattcgtccgcccggaatggctgagggatggctggagccgtgaccgcatcgtggccgagatccaggcaggcggcgtgccctgctatgcgggcggctgctcggaggcttatctcgagaaggcgttcgattacacgggctggcgcccgccgcaccggttgcccaacgccaggctgctgggtgaaaacagcctgatgctgctggtgcatcccaccctgaccgacgccgagattgccctgactgcgcaggtgctgcgcgaggtcatgcttcgtgcaacgctgccgaccggtgccgggcgggacgccgacggcggggtggtgcccggcctggcgcaggactgcgcgggcgccatgcggcgatgatgcactggccgtcgctgatccagcttggcaccattaccttgctggtgcccgttgcgctggtcattgcgctagcgctgtccgtggggggcgcatggcgcagcgcgctgcgatggctggtgtcgttcagccttggcgccgcgctggtgggggctgccaagttcgcgtttgattacggcggctggtacctgccgcagctcggcctgtacagtgtcagcggccacgccatgctgaccgcggcgacgtatccggtgctgctgatgctgctgggttcggcgctgagcccgcgcgtggcacgcatcggctggttcgcgggactggcgctggggctcgcgatggcggtgaaactggtgtccggcaattaccacacgctgtccgagaccttgctgggtggtgcggtggggctggcggttgcgtggctgaatgcgggcatccgtatccgcgggccggcgccgcagatcgtgctggtggctgcgcttggcatcggcgccttcgtctttgtcaatgtgcgcgggttgctgtacccggtcaaggccgcaatgtgggagcacgcggcaccgtggcaggacggcacagtgcggcattaccggcagatcgacgccgatccggtgacgggcgagacccgcatcaccgtgcgcaagcggtcgtgcctgtcgaagcggggccggcaggcgccgcgtttactcacaccatcgaaaacaggaacatctacccggacaccaagcttgctctcgacgcaaactacatgattgggcactctcatcatcagtttaaaacagaaaatggcagttttattccttacaacagcggtgatgtggggcagaacaggttgcacattagtatcattaattatctggtattttgcaccgacgaaaatcaggtagagatgaggtaggccgcatatgcaaggggccgtatcgggctggcgcctgccgtgcccggggcagaacgccgcgccggccgtttggcaggccgctgaccgcctcgcgccgtgcggggttgcctccgcggaagcgcacgctgcgtgtcgtgcattcgtctaccctgaaccattccagcgcggcgctggccgcctcacccctcgagtaggtgcgccgccgcgcacgcgtgggcgggcagcgcagaaatgggtacgctccccgggcctgtgcgcttgtcagtcgcgcggcagcggtgcgccgaggccggcggcaccctggcgcccggcggctcgcgggccgcgcagcagctgccacaggcaagtcgccgtgtcatagaaggtgccggcgccgcgcagacccgctgcgcgcagatggtgcgcaaggtcgtgcggcagggccaacagcaggaacactgccgtcttcagtgggtgctgcgggccatggtcatagcgccggcaggccacatacagtcgtgaggcgtcgctggcggagcatggccggtcggccgacaccgacggcaagcgctggttgactgcgctcgggaccatctcgatgcggtagccgaattcctgcaccgcgcgtccggccagttccaggtcgtcgtagccgacggcaaggtgctcgtcgaacgacaggttctcgaacagctcgcgcgggaacaccgcgctgtgcaacagcaccgagcacaggcgctcgccgcggcggtagtccagcgtcgggtggcccaggaacgccggcttgcgcggaacgccgcgccgcccctggcagacctcggtcccggtcaggatgagcggcgtcgcgcagccggccgtggcccgccggagatggtcgtcggcaacggactcggtcatctgctgcaggaaggttgcgcccagcagcgtctggtcatccaggaacagtacgtgcgagccggtggccgcgcgcagggcgcggttgcggttggcggccctggagcggcgcgggccttccagataggtgatgtccggatagtcccggcgcatcatctcgcgcgtgtcgtagccgctgctgtcatccgtgacgatgagctggtgcgccggcatggtggaatcagcgaccgattgcagcgtgtgccgcagctgctcgggatggtcgcacgtgtagatgcacaccgaaacggtgggcaggaacgagcttgccggcatggtgacccctccaatgttcggcagatggcagacacctgcgccggcccgtctggtgcgggcgcggcgcaaggtcctgaactacagcaccgggctggcggcctggagcgcggcttcgccggtgcgggacgcaaccacagggcgcgcggtgctgccgcgcgtgaagcgttcatcgccgctgacccactcgagcgtcgcgccacgttgcagggcggcatagacggcctcgcccttgttgcgtaccttcaggcgctggtacagcgtgcaggcgtgactcttgacagttgccaccgagatattgagcatgcggctgacggtcttgatcgggtagccgcgtgccagcagcaccagcacctcgtactggcgcggcgtgatcttcagcatttcggcttcgtcgtagctgggctcttcctcgaccagcggggctgcattggtggcagccggggccgacagcggctgccccggccggaggccggtgaggtcgcgcaccgccacggtggtgcgtgcggcaccgggcgtgccggcgcatgccaccagcgacagttgctcgcctgtgagcgcgtgcgcagggttcagcggaagcggcgcggccgaggccagcgactgcacggccggcatggccgaacgcgacgccgacggcatcgagccggtttcggccgagaacagcagcccctgcacgcctgacaccgccagccggatggccgcctcgatcaccgccagcgaagcggatttcggcaggcagccgcagacgccgcgggcgctgtccgcgttgggcacatgcaatggcaagatgtctgccaggatcaggatgcgttgcggcgacagtgcttcgcgggcctgttcgagctgcggccagccagaccccacatcggcgggcatgccgaatacgagcaggtctgcgttgtggtgccgggtgtccagcctggcgatgtccgcgggcgcaatggcggcaacctgggcagactcctggatgttctcgagcatctgcaacagcccgagccggagcagtggatgctcctcgatcagcaacgcgttcattgacttcactccccgttactcgggggcggaatgcggggcgctttgcgtatggagggcattgcaggacagcagtcacctgcggcgactggctgcttgtctgacccccatgcttccatgctccggcagtcccgtttttctggatggaacttgtcggtggctggaaggttgacccgaacccgaacccgaaagattctcgctcctaaatcggcttaaattcatcttatgggctggttgaatggaatgcaagcgagccggtctggtacgagtgtgggtgggaatgaaaggacatacataatcctttcaaaaatcatccgaacgcaccggtccaggttccgcaaacgccgcgctgatgcggggtccaggaggtttcacggatgtgacatcgggatttaatttggttgcagcattgaaacagatagcattatctgtaccccctgaaagtagtattcttaaccccatcgtggggtatcggtaatatatctgcggcggattgctccaatcatgaaacgccgctttcatatgtgttttcgaaataggcctgcctgattttcaggcaggtcgggcgcatggcctagtgcttctggatgagagacgtctcccacctcgggatgagcgctgcggcgccggctgcaccgacctgcgccggacttgccaccgcctgccgggaggacagggtggcgggcccggggccggccggcaggttcgtccgcgcaggcgtcagcgggcccagtggccgggatgcatgacccagccgtgcggaccgcgcacccagcgctcgggcacataacggtagcctggacgctgcgccttccagtagccggcgcgccagtcgtagcgcccgccggtggcggtccagtggcccggcacccagacctggccgcggcgcgcggcggggtgcggttcatagcgcggcggcgggggcggacggtcatagccgtgggcgaccgccaccggatgagcctcggcgggggcggtcagtccgaaggtgccgcccgtggcgaggacggctgcggcaatcaggagctggcgtttcatgtggattctccttggggcggttggaagcggttcgaagccgctggctcggtcaatagcggtcgtagtggtggtggcgcggcggcgggccgccgcgcggtggcactacgatgcaggcggacagcagtgcggccgtggtggacagcagcaccagcagcgagagggcgcgtttcatatgggctcctggcgggttcgcgttggacatggcttcaatgtagcgagccagccccgctgcgcgtgcttgcacttgtaaggctgtctcacaaggggttttgcagcgggcgcagccccgcaccgggcgcgcggcatcccggaagcccttgcgtatcaaggcgttgcgcgcatggcggcaggtccatggcgtggcctgcgcgtgccgggttggaggtaatgtgacgttacacgggaaatgattctcgcaaggcaacggatcccggagcaggcgccgcaccctttgtgggcggcctggccgggcacgcagaaacgggtacgctgcaacggtgcgcgatgcctcggcatggcccggttgggggcgcactggtggcgtcgcggcgccatcacggtgcgttcagtcgcgcaaatcggtggggcggaaatggcatgaagcttgcgccatgggctataccagtcggaagtggcctcgtgtgcttgaaggaggcgtcatgccggtcatgctcatcgtgcttgccctgcaatggctgcaggggctgtcgccgcccgccgcggcgttgttcgcgctgccgcaggagatggcgcccgcggatgccgcggccatcgtcgaacccgcgctgacacgctgacatgggctgacgccggggtggtatgactaccctgccgccgtggcagtccgagtggttccatccaacctaccactgtcatggagtcagcatgaaccgcagcgacgtcaccgacctcatcatcgaagccaaggtcacccgcggcattgcctgggcgcaggtggccgaacgcgtcggccgcagcaaggaatggacaaccgcggcgtgcctgggccagatggcattcgacgccgccggcgcgcgcgcggtgatggagctgttcgggctgccgcccgaggccgagccctggctgcgcgaggtgccgtacaagggctcgctgccgacgcaggtgccggccgatccgctgatctaccgcttctacgaactcatcagcgtgtacggcaccacgttcaaggcgctgatccatgaagagtttggcgacggcatcatgagcgcgatcgacttccgcatggacctgcagcgcgagcccgatcccaatggggaccgggtgcgcatcgagatgtcgggcaagttcctgccctacaagacttactgatgggcgaccgcgcgcacgggcggcagcgcaagcgacacgccatagcgcgccggatccaggcgcatggtcagcacgcccaccagcgcggcgcaggccaggtggtaccaccagccggcggcgaagccgccggtgcgttcgtgcagcatggcggtgatccagggcgccagcgacgccagcaggaagccgccgccttgcatcagggcgctcagcgcgccggcgctgtcggggtccggcaggtggtccagtgccaccaccaggtataaggcaaagcagccaccgaggccggcgccgccgatcacggcccacgcgtgcggcgcggcgtcgggccacagcgccagtccaccgaagcccgccacctgcatggctagtgccagcgccatccaggcgcggcggtccaggctgcgcgcggccagcaccggcagcagcagcgccgcggcggcctgcgccaccgccatcagcgccaccagcgacccgctcgccgaagcgctccagccgtggtcctggtagaacggtgcgagccacgccaccagcgacgcatagccgccgttcatcacgccaaagcaggccatcagcagccaggtgcgcggacgccgcaacagcgtgcgcgttgccctcgccgggcggcttgccggcaccgcggggccgcgcgccgcggtgcgcggcaatgccacccaggccagcgccaatgctgccagcgcaggcacggcccacagcgccagcgcatcgcgccagctgccggccaatgccgtcacgtagggcgacagctgcgcgccgagcgcaccgccgcccatcagcgcggcggagtacagccccatcaccggcgccacgcgccccgggaattcctgcttgaccaggcccgggcaggcggcctgcaccacggccacgcccagcccgcacagcgcggccgaggcgatcagccaggtgccgtccgccacgcccagccgcagcgcgcagccggcaccgagcaaggccagcgcgcccagcaccgcggtgcgcgcacccagccgctcgcggatggccggcccgaagaacgcgcccgcgcccatcagcagcatcggcagcaaggtcagccaggccatgccctggtagctcaggccggtgccactgcggatggccggggccagcggccccaccgcggtcaggaacggccgcaggttcaggccgatgcccgcgaccgcggccagcaccagccagcgcggggtggtgccgcgcgcgccctcagccacggggcgcgcgcgggccgtagagctgcgccgcagagaggtcgaccgccacccgcgtgagcggcagcggcggcgggttcagcgacaggcgcagtgcctggtaggcggcctcgctcgacatgccgtagggcgcggcatcgtggttgtcgaaggcgtagtagaccgcctgcacgccggccatggtcatcgccgccaggcacatcgggcaggggtggccgctggcatagaccacgctgccgcgcaggtcggggcggcccagcttgcgcgcggcggcgcgcaccgcctccatctcggcatgggtggtggggtcgtggctgtggacgatgtcgttgacgccggtggcgacggcctcgccgtcgagcaccagcacggcaccgaaagggcgcgcgccacggtcacggttggccgcggcaaggcgaaccgcctcgcgcatgaattcctggtgagtggtcatggttggcaaagaagtgagtgcatgctcgcgagtcgggcggcatgggtcttcgtggggcttgcccggcagttgtgggacgcgggccggggcagcgtgcaactgtacgccggggcttggtaattgggaaattaaatgatgaaatcgccggcagtggagaaactaatggataaccggccatgcaggaccctcgcctcgatcccgtactgctgcagagctttgtcgccgtggcggaaagcggcagttttacccgcgccgcgcagcgcgtgcacctgactcagtcaacggtcagccagcaggtgcgccggctggaagaccagctcggctgcgtgctgctggaccgcggcggccgctatgtcaccaccacgcccgagggcgagcgcctgctgggctacgcgcgccgcctgcagcagctgatggccgaggcggtggggcagctgcgccagagcgccggccagggcgagatccgcatcggcgtgcccgaggactttgccgcgcggccgctgacgccggtgctggccgggtttgccgatgactggcctggcatgcggctggaggtgaccagtggcatgagccatgagctgtggcagcgcttccaggaccgggaactggacctggtgctggtcaagcagcgggtcgggcaggcgccggggctggccagctggcccgagccgctgtgctggatcgacagccgcagccgtccggcggtggcgcgcgacccggtgccgctggtggcgtttccggtgggcgggctgtaccgcggcgagatgacgcacgcgctcgacgccggcggacggcgctggcgtgtggcctttgtcagtgccagcctggccagcatcctggccgcggtggccgacggcctgggcgtcaccctgctgccgcggcgcctggccacggctcagcaccaggtgctggaggacggcggctggcccgccgcggtgcccgacgtcgagctcagcctgcacgcgcagccggacctgccggccgcggcgcgcgacatggccgcgcggctggccgcgctatgcgagaccgtgatggggtcgggcgcgccgcccgcggatcagccgaagaactcgttgtagtagcgggtgcaggtgccggccgggcggaaggtgtatggcagctcggccattgccgcggcttccagcgagccgaacgggatgtcgggcgcggccagggggccggcttcgggggcggactgatggtcggggcgcgcaagctcggcgcgggtgttggatggcgaagtcatgtcaggctcattctcaagggtcgggcactgcacccggcaactgcggatcggcgttgtcaacgcgtgcagccatgctaatgctgcagcgcggcgcagtcagccaccccagcctgaacacactgttgcgcaatcgcgcccaatcggggcgacttgcccggcgttgcgagcgcctggctgccgccggcgacttgcgccaacgccgtccgcggcagggtctatattggctgagggttgcctgcgccgcttgctttgcgggcagcgcgggcctgagtgccgctgaccttccggagcgtgccatgtcgttgcctccatgctttaccgatcgccgcgaggctggccagtacctgggccgccgcctggccgaactgggttttggcgccgcacaactgggccagcccgcgctggtgctggcgctgccgcgcggcggggtgccggtggcgttcgaggtggcgcgcgcgctcgacgcgcagctggacgtgctgctggtgcgcaagatcggcgctgccggctatcccgagctggcgctgggcgcggtggtggagggcgatgccggcggcggcggcccgcacacggtggtcaatgacgatccctgggcgcgccgcgccgtggaaagcggcagcttcgatgccgagcgcggccgccagctcgacgagatcgcgcggcgccagcggcgctatcgcggcggtgcgccggtgccggagcgcgccgggcgcacggtgatcgtggtcgatgacggcgtggccaccggcgccaccatgcgcgccgcgcttgaaggcgtgcgcatggccggggcggcgcgggtggtggcggccacgccggtggggtcggagcaggggctggccagcctgtcggccgcggccgacgaggtgatctgcctgaacacgccccccagcttcggcgcggttggcgccttctacctggatttctcccagaccagcgatgaagaggcgctggccctgctgcgcgcggcggcgccgccgcctgcgcgctgaggttcgctcagcccttgcccaggcgcgccttcaggtgcggcaccagcccgccggcggccaggatcgcgcgcaggaagtcggggatgggttcgcacgcgaccaggctgccgtcgtccaggcgcagctgtgccgtcgccaggtccagcaccgcgtgcgcgccgtcggccaggcggcaggtgtcggcgcagaccagcaccggcaggcccaggttgatggcattgcgatagaacagcccgccgaaggactgcgccaccacggcgcccacgccgagcgcgcgcagcgcctgcggcgcctgctcgcgcgaggagccgatgccgaagttggcacccgccaccagcacgtcgccggggcgcacgctgccggggaactccgggcgcagcgaggccaggcaatgccggaccagcacgggcagcggcgatttcatcagcacggcgggggccatggcatcggtgtcgatgttgtcgccgaagcgccagaggcggccagtggggtcgggggcgatagcaggggtcatgcaagaagtctgtcccgccaggcgggcacgaagtcaggtccgcagcgttactccagcagggtgcgcggatcggtaatgcggccggtgacggcgctggcggccacggtcatcggcgagcccagccacaccgcgctgccggcatcgcccatgcgcccggagaagttgcgcgccgtcgacgcaatcgcgcggctgcccgccgggaagcgcgccgcgccatagccggcgcaggcgccgcaggcgttgggcagcagcgtggcgccggcgtcggtcaggatgccaagcgtgccctcctgctcggccagcagctggtcgcggcgcgaggccggcgccacctgcagggtcacgcccgctgccacgcggcgcctgcgcagcacgcgcgcggccatgcgcaggtcttccagcttggcgccagtgcaggcacccaggtaggcgatctgcacgggctcgccggcggcctggtctaccggcgcgctgttggccggagagtgcggcgccgccacctgcggcaccagtgccgcggcgtcgaagcggtgtgtggccagcaccggtgcatcggggtccgtgcgccagtgggccaggtcgattgcggccagcgtctgcgccggcacgccggcctcggccagccagccgagcgtgaccgcgtcgggcgccaccaggccggtctgcgcgcccagctcggcgctcatgttggccagcgtcatgcgctcctgcatcggcagcgcggcgacggcgctgccggtgtactccagcgcctcatagcggccgccgcccatgccgagcgtcgcgcacaggaacagcatcatgtccttggcgcagacgcccgctgcaagctggccgtcccattgcagccggatggtattgggcacgcgcagccagatctcgccggtggccagcacgccggccatctcagtcgcgcccacgccgaacatataggcgccgaaggcaccgccggtggggctgtggctgtcgccgccgacaatcaggcggcccggcagcacatggccgcgctcgggcagcaccacatggcagatgccttcggcgtcgatgaagtgggcgccggactggcgcgtccagtcgcgcgtgaagcgcaggatcgactcggcctgggcatcgccgcccggcacgaaatggtcggtcaccaccacatagcgcgacgggtcccagaccccggtgccaagctcttccaacagcggcgccacgcggcgcgggccgctggagtcgtgcgacatcgccaggtcgacccggcagatcaccaccgtgccgatctccgcatgcgccagcccggcggcgcgcgcaaccagtttctgcgccagcgtggcgggagtatggctcattccggcgaggctcccgaatacttgaccacggcggcccagcgcctgacgtcctgcttcacgaaggcggcgaaggcgtcgggcggcgtgcccatcggctgcgccccgtcgttctccaggcgcttgcgcaccgcgggcgtttccagccccttgcgcgcggcctggtacagcgcctgcgtgacttcgtgcggcatgccggccggaccgaacaggccgaaccacgcgctcgattcaaagcccttcacggtggcgccgatcggcgccgcgcccgggaactgcggcagggccgcggggctggtcacgcccagcaccttgagcttgcccgcgcgcacatgcggcagcacgttgatggtgctggcgaacatcaggtcgcactggcccgccagcacgtcggtgagcgcgggcgaggtgcccttgtacggaatgttgacgatataggtgccggtcatcatcttgaacatgtcgccggccatatgcagcgacgaccccaccgagccgatggcaaagttcagcttgcccggttcggaacgcgccaggcggatcagctcgggcacattgctggccgccagcttaggcgtggccaccagcacgctcggcacggtggccaccagcgtgatcggggtgaagtcctgcaccgggtcgaacggcagcttcttgtacagggtggcgttgatggtgtggctggtgaagctcatcagcagcgtgctgccgtccggcgcgcttttggcgaccaggtcggcggcgatattgccgccggcgccggggcggttctcgaccaccaccggctggccgagctcctgggacatttcctgggcgatggtgcgcgccagcgtgtcggtggtgccgccggcgggcgcgcccaccaggatccggatcggcttgccgccggccacctggggttgcccctgggccgcggcggacagcggcagggccagcgcgcacacggccaggctggccatggccaggcgctgcaccgcggcgcggcgggggatcgaaggcagacgggtcgggctggacgggaccaggcagaacacgggcatggcgacggctcctcgcttgatgtgatcagagatgcgcagtatcgcccggaacgttacgtggcgcatccctggctgcgccgcctgcgggaagtcggcggcggtccgcggggtcagtcgcgcaggcccgggcgggtttcgctttccacccagacgttggcgctgtcgacgccggccggcgacaactccatgcggtattcatagcggtccgggcggtactggccgagcagcaactggaccgggcgcccggccgcgtccttgaccacgcggcgcaccgccagcagcgcgccgcctaccggcacgtccagcagcggcgccaccaccacgtcggccaggcgcgcggacagcacctggctggcacggcccagcttcacgccgccggcctccagcagccgcagcaccggccgctcttccagggactggcgcgtgatcggccggcccaggtcggcgggcaggtagaccgtgatatgcgacagcggccggttgcggtagtggcgcacgcgcacgatcttcaccaccggatcgcccggctcgatctgcagcgattcggccacatcgggcgtggcatggacttcgtcgatcgagatcaccttcaccgacgtcttctggcccatgtcgatgatgttgtcgagcaggctggtgccgcgttcctcgccggccgccgtcgccgggcgcaccggatgcgggttgacgaaggtgccaagcccgcggtggcggcgcaccaggccttcttgcaccaggcggtcgaacacgcgccgcatggtcacgcgcgaggcgtggaactgcttggccaggtcgatctcgcccggcaaggggccctggccgaagcggccttccacgatctgctggcgcaataccacgtaaatctggtgatacaggggaacgacggcttcactcatggtttcccttgcggagagatgacaagtctgtaatgcctctaatgtactttaaatcagacatagagcctagcatggttagccgcagtggcgcttgcgggacaactgcgccggcgcggtgttgcagcgatgcatctcgtctgtgccgagacccttggctggctgcgccagcgcgggtgaagtcggtctggcgccgctgcatgccttgctgggatggacaacgccggtgcggtggagcgggttgtgccgtgcggcgagaacaggacatcggggcgccgccgcagcaatgtggagatgccccacacgggcggcgacgacggcaccctcgatgccgtgtttcagtcccgatacgtaaggtcgcgcctcgggcaaattctggctgccggcataagaccctgaaaaataaggcgttttccgactaccccggaacccccccaggtgggccgggagtggccgtgtcacagcggtgtgacatgtcgtctgccgtgcacagcggcgagggcggcaagcgtcgcgcaaagccgcggaaagtccccgccagagtgccgggcgggccttgtaatacaaggagttggcgccgcaggtggcgcagctggcaccgattatgcgcaaggggagtctggtttggctgggtgccggacctgaacctccagccgtcgttcctcgcaagagcgccggccggaggctgagccgctgtgacactgtgcaattctcctgggagcttcgtatgaaaaagaccttactggcgtcggctatcgccatggcatttgcgggacaggcctgggcaaatccgaccaataacaacgacgtggtaagaggtggcggcgacaacacgcaaaccgccacagcgacctcgacgcagagtggcagcggcgcggcggcaaacgaatattcgaccgcagtccaggccaatgacagcagcaccaacaccagaaccaccacggttggcgtcaacaagaccaagaccacgaccaactcgaacaacaggagcaggatcgactttgaccatggcgtaggcaacgcgggctccaacggtggcagcgcaacctccagcgtaagcaacgccttcaacaccagcaaggcactggcgatcagcaagctgaatggcacggtttccaacaacagcattggcccgatcggcaattacgccaccaactggggtaacgcgaatggtgcagccggtggccggggcggcaatggctttggcggtaccggcgaaggcgggcgcggcggcaacggcggcaacggcggtaacggcggcagcggcggctccggtggcagcgctaccaacggtagcgccaccaatggcgacgccaccaacggcagcgccaacgctggtaatggcggtgccggcggcaaggcgattggctgggccggcagtggcggtgacggcaaggcatatggcggcagcgcactctccgcagcgggcagcaagggcggcagcggcggcgatgcttatggcaagggcggcggcgctctgagcgcatcgctcggcgccggcggccgcggcggcagtgccggcgcgatcggcggtggtggcctgggtgccagcggcgccctgggcggcttggcaggttcggccggcggctcaggtggtagcagcggcaatgccaacggtgcgggtggcgacactaccactggcggcgcaggcggcgcaggcggcgcagcggccggtaccaacacggctggcgcaggcaccggttcgggcggcgcaggtaccgcgagtggcggtgcgggcggtgccggaacggcagctgcaggcgcgaccggcggagccggcagcggcaccggcggtgccggtggcgcgggcggcgcggcgacctcgaccgcaacggcgggcgcggcaagcggcaccggcggcgcgggcggcacgcaagccagcgttggcggcgcgggcggtactggcggttcggccacgaacggcagcgcaacgagttcggcctccaatggcagctccacggctggcaacggtgcggtgggtgctaccggcggcgcgggcggcgcgggcggcactggcaatggcggcactggcggcaccggcaacggcgcagtcggcggcgctggcggtaatggcggttacaacattgttgacgcgggcaccttcaatatgtccaacaccatgaccagcgttggtcaaacggcggcgggcatcatgatggccaaccagaacagcggcgctgcctcgctcgtgcagcaaagcgtgaacgttcaggccaacctgcaggtcggcggcaaccggtaaggcgtgcagccacggtctggcccgggacttgtgcccgggccagaccggcagctcgcactcatgccggcaggaccggcgcccgcatcctgtgtgcgggcgcgcgggtcctgtcatgccccaagcaagcctgattgccttgcagccgtccggatgggggcggccggcaggcaaggggagacgacatcatgcaatcggtccgcttcgccgtcggcgcattcgcgacggtcttactcgcctggccagtgctgcaggcgcacgctgagccgccagggctggacgccgccatggcagcggcgcgcgctgcttctggcgctgccccggacacggctgcaatcaccgcacagccgacggccgcaacttccttgttcggaggggtggcgaaagccgtacccgtgtctaaactggatgacatccgtggcggcgccgaggtcacggtcaacgatatgcgcctgcacggtaccgtggccgacaacgccgcggtcaatattctgtccggcaccaacaacatcgcggacggggccttctcgaatgcggcagggattcccaccgcgatccagaactcgggctccaacgtactgatccagaacgccactatcgtcaacgtccagttcaagcaatgaagccgctgcgaaacctgttggcgtctgtaccgttcttgctggccgcggggggcgttccatgtgcccaggctgccgacaccctgatatacgggccggtcggcgagtcctacaacgtccgggtcacgagcgtgcgcgaggctcgcttcaagtccacgatccggcagcagttcgacttcagctgcggctcggccgcggtggccacgctgctgagctaccagtacggccatccgatgaatgaggccacggtcttccagaacatgtacctcaacggcgaccagcagaagatccgcgccgaggggttctcgctgctcgacatgaagcgcttcctggccgcgctcggctatgaggcggacggctacgagctgccactgtccaagctggaagagacgcaggtgccggccatcgtgctgatcgtggagaacggttaccaccatttcgtggtggtcaagggcgtgaagggcgaccgcgtgctgatcggcgatcccgcacgcggcacgcgcgcgatgtcacgcgagcatttcgagcagatctgggacagccagctgctgttcgtgatccataaccgcaccgaacgggcgcggttcaaccttgcagccgactggcgcgttgcgccgagcggtccttactggatgggagtcaaccgggatagcttgttcttcaccgtcatgcccaagcatggcgcgggcgatttttgaggaacgcatcatgttgcagacttccttcccgaccccagcagcccctcgcagcgccggtcatgcggccgcggcgatgctgctcggggccggtttggcctgtgccggcacggcgcaggccaccatgctgccacagcccgacgccctcgacgcgtcggcgcttccattgcagggggccatgccctcgagcgacgggcaggaccaaaaccctctggctgccgcacgcggcagcatggccggctggaaaccggtagcacacgaaaaactcgacgacatgcggggcggcttcgaagtgccgggcctgcaggtttcgttcggtatcgaacgcgcggtgtacatcaacggggccctggtggttgccaccagcattaacatccccgatgtcagccgtatcaccgccgaccaggctgcgcggcttgcctcgacgctgggcccggccatcgttgccagcaccaatgcggcggtcgccaacgcgctggcggcggcgggcgcggccggttcggatgggagcgccacctcggcggccaatggcgcctcggccagcagcaccggcacgtccggggccggttcgggcgccagcggtgcggcgggcttgccggcggcggtggtgaatacggccaccggtcaggtcgtgagcaatgggctgttgaacgtgatccagaacggcccgggcaatgcggcatcggtgggatcgctggcggggacgccaacgaccgtgatccagaacaccttgaacaaccagagcatccggagcctgatgacaatcgacgcaagcgtaaatacgctgcaggcattccggtcgcagttggccaacaccacgctgaacaacgcgctgatgcgggccgcaagcatgaggtagtcgtagcgaggcatcgggcagtacaggtcgcaggctcctgcaagaacagcctgccgtcccgggggaggaagacgtcatgaagaagcggtcgatgcagggcattcgcaatgcgggatgctcgacgttactgttgctcggcggcctggcgcaggcccagacgccgccggatgcgggaccacccgcagccggactggaagcactgcagaaggagcttgccgaacaggccacccagctcgacgccatgaagcgggcgctggccgaacaggaggcgctgatccgcgaactgcgtaacgtgatcggcaccgaggtgctggccaacaagcgcggcggccagcgcgcggggccaggcgtgtcgccgtccgacaatgccaccaacgccgctaccgcggcggccgctgccagcgccacccagtcagcgcccaacgcggtcaacaacccgcagcagatcattctccagccaccgcaggacatggcccagggtccgcaggcgggcgagtccgccgaccggcagaccgtggccctggaagaacccgtgggccgcccgccggaggaagaccgccgtccgcctgagatcgcgccgatcatcgaccagcccggcgtgctgaccgcccagggcaagctggtgatcgagcccggcttccagtacggctattcgtccaataaccgcgtcgcgctggtcggctacacggtcatcccggccatcctgatcggcctggtcgatgtgcgcgaagtcaagacctcgacctacatcccgtcggtagcgtttcgctacggcctgaccaagcggctggaaatcgaagccaaggtgccttacgtgcactcatcgggccagacagtcagccgcgaggtcttcaccggcacggccgtcgaccgcgtgttcaatgcgagcggcagcggtatcggcgacgtcgaggcgacggtgcgctaccagctcaactacggcaacgagaagattccgtacttcgtcggctggctgcgctacaagtccaataccggcaccgacccgttcgaggtcgtgaccgactgcgtgacgcgctgcgtgggcaatgccaccggcaccggcctgccgctcgggttgcccaccggcaccggcttccaggcgatccagcccggcatcacctggctgctgccgactgacccggcggtgttcttcggcaccttcagctacctgcacaactttgcgcgcgacaacgtgagccgcaccgtgctgaacggcgagaaggagaatctcggcaagatcgcccccggcgacatcttcgagttcagcttcggcatgggcctgtcgctcaatgagaaggcgtcgttcagcatcggctatgaccaggccatcatctggccgaccaagcagaacggccagaccgtgccgggctcggtgcgcgtgacccagggcaccttgctggtgggctattcgtaccgcttcaacaaccgctacacggtgaacctttcagtgggtgcggggctgacgcgcgacacccccgacctgcaggtgaacctgcgcctgccaatcactttctgacgcgccttgctgcgaatttccgcctgacgtgacgcgtgccccgcatgtgcgggggcacgtgcgcatcacatccgcggcgagggtgcgcaggcacggaaacgcgccttgcgctggccccttgaacggcgtacaaagaaataaccccgcgccgccagcggtactttctgaccaggctcaaactcaccggcggtgcggcctgaaaaaggagagagacatgcgcaaacgcatcttctggttgttgcccgacctggcgagtgcccgtcgcaccatggacgacctgctgcttgcccggctcgagaaccgccacatccacttcgtggcgcgcgacggctccgacatgaccggcctgcatgaagccaacctgttccagacctccgacatcgtgcatgccgccgagatgggcttgatggtcggcggcggcgtgggcgtcgtggccggcgtcgtggtggcgatgttcccgatcgtcagcgacaccccgcagtggggcctcgtcggcgtgctggcggtgctgggcgcggtgtttggcgcgtgggcctcgagcatgatcggcagttcggcacccaacagccggctgcgtgcattcgagaaggacatcgaggccggcaagatcctgctgatggtcgacgtgccgcgcagccgtgtcgaggaaatcgaaaccctgctcgcgaacgcgcatccggaagccagctttgcggggttggacccggctgtgccggctttcccctgagccgtcggcgtatcgtcgcttattgtcgttcaacgcggtcgcatgtctttccgcgcgcccttgcggcgcgccctgacgcgcatcctttagcgcgccccggctcgcaccggaaccgccttcgcggttccggtgtgatgccgctgcaacactccgatctttcccggtttgcccccatgagacgcatgcggtaacttgcgtaacggcgcgcggccgtgcatgccgcgccgccatacacaatgaaggacagccgcacaggcgcaaggggtcgagacaatgaaagcgaaatggatcgcgtgcggcatgctggccgccacgctgggatgggccgcacagacggccctggcggaaccgggcgtgacccgcaacaccatccgcatcggccagtcggccggcgtcaccggtccggtggcgggttcggtcaaggagcagatcgccggcgcgcaggtgtacctgcgcaccatcaacgccagcggcggcgtggccgggcggcgcatcgagctggtgacccacgatgacggcttcgatgccaagcgcacgcccgacaatgtgcgcaagctgatcgacgaggacaaggtgttcgcgctcttcatggtgcgcggcacgccgcagaacgaaagcatcctgcccatcatcgccgcgcagaaggtgccgctggtggcgccgctgaccggcgccatcacgctgcaccggccggtcaaccgctacgtgttcaatgtgcgcgccaagtaccaggacgaggtggcgcgcgcgatcaaccacctggccacctcgggcatgagccgcatcggcatcttctacgccaacgacggttttggccgggacgtgctcgaaggctacagcgccgcgctgcaggcgcgcggggtgcagccggcggcgacggcaagctttgcccggcccatgggcgatatcacccagagcgtggccgccatgaacaaggccaacccgcaggcggtactggtgatcggctcgggctccgaggcggcgcgcatcatccgcgaactgcgccgcgcaggcagcgaggcacagttcgtcacgctgtccaacaacgccgccgattcctttatccgtgaactgggcgacgatgcgcgcgggctgatcatcacgcaggtggtgccgggcaccaactccagccagatgacgctggccagcgaataccgcagcctggccaagcagcagggcgtggagccgtccaacgccggcatggagggcttcatgtcggccaaggtgctggtcgaagggctgcgccgcgccggccccgacctgacgcgcgagcgcctggtcacggcgctggaaggcatgcgcgactacgaccttggcggcatcctgatcagctacagcgccgagcgccataccggctcgtcgttcgtggaaatgtcgatcgtctcgtccaccggcaagctgatccgctgaaagccgcggataggggggctgcggtatagtcccccgcatggctactcctaccctctcccccgattcccgtaccccgttctcgctgcacggccgcgtggcgctggttaccggcggcgcgcagggcctgggcctggcgattgccgccgggctggccgacgccggcgcccatgtgctggtggtggcgcgcaatgcgcagcgcgtgcaagcggccgtcgccgcgctggccgcgcgcggcggcagcgccgaggcgctggtgctcgatatcaccgatgaagccgccgtggctgccgcgttcgaccgcatcgacgccgcccatggccggctcgacatcctcgtcaacaatgccggcgcgcgcaaccgcagcaccatggcgcagctcgatgccggcgacctgcgcgccatgctcgagaccaacctggtggcgccctacgcgctgtgccggctcgccgcgcagcgcatgcgcggcggcgattacgggcgcatcgtcaatgtgagctcgattgcgggccaggtcgcgcgtgccggggacgtgctctaccccgccaccaagggcggcctggatgcgctcacgcgcgccatggcggccgacctggggcggcacggcgtcaccgtcaatgcgatcgccccgggctacttcgctaccgagcccaaccagcccatggtcgaggacgagagcgtggccgagtggctgcgccagcgcacctcgctgggccgctggggccagccggaggaagtggcgggggcggtggtgttcctggcgtcgccggccgcgtcctatgtcaccgggcaggtgctggccgtggacggcggctatctcgggcacttctgagccgccgtcggcggcaaggcgtacgtacccaattctgcgtgccgctcctggcgggttttcagcgccgcgcgggcggcttgccgccgcggtagaacgcctgcaggcagtcgatcatcgcggctgcagcggccgagtcgccgcggtccttgagccgcaccaggcagatatcgcgcaccagcgacggcagctgcagtggccggatcgccagcccctcgcgccggaactgaaacagcgccagcgacggcaccgcgctcacgcccagccccgcctgcaccagcgccgccaccgtcgccaggtgctccacctccatcacgctggtcaggcgcaacggatgcagcgcggcgtccaggtgctggcgcacgctggtcgtgcgcgacagctggataaacggcaggcccgccagcatctgcggcgtgatgcggcgcttgcgcgccagcgcatggtccgccgggcacaccaggtggaaggtgtcgcgcaccagcggctccacgcgcaggtcttcgtcctgggccggtgccggggccagcgcaaagtcggcgcggccctggcggaccagttcgatgcagccgtcggcgagctggtcgaacagctccagcgcgatgcccggatacagcgcgcggaactgcgccagcagcggcggcaagtcgccgccggccagcgacggcagcgccgcgatcgacacccgccccttgcgccgctcggcgtgcgcgcgcaggtcctcgaacgcggtttcgaaatcggccagcagccggcgcgcggtctgctcgaagcgcacgccgtcgctgctcagctccacatgccgcgtggtgcgttcgaacagccggctgccggcctgttcctccagtgtctgcaccagcgcgctgaaggccgattgcgacaggtggcaggcgcgcgccgcgcgcgtgaagttgcggtaggtggccagcgccacgaaggcgcgcaggtgcttgaccgagaggttcatgggctggcggatttatccactaagtcgatagattaatccaaataatccgttttttggctggacgtaccagccctagaatgggatcgaccccaccaacgacctgcccccgaccatgactgctcccttgctgatcggctccggcgccggcttctccggcgaccgcaccgatgccgcgctgccggtggtgcgcacgctgattgcctccggccagccggccgcgctgatcttcgagaccctggccgagcgcacactcgcgctggcgcagctggcgcggcgcaacgatcccgcgcagggctacgagccgctgctcgatgcgctgctggtgccggtgctgggcctgtgcctgcaacaccgcattcccatcgtcggcaatttcggcgccgccaatccgcgcgccgcggcgcggcgcgtgctgcagctggcgcaggaactgtgcctgcccgcgccgcgtgttgcggtagtggagggcgatgacctgtccgacgatgcgggacgcgcgcgcttgcacggcattcttggcgatgcattcgacgccgatcgcttcgtctgcgccaacgcctatatcggcgcgcaaggcatcgccgaggcgatctccgccggcgcccaggtggtggtgtgcggacgcgtggccgatccggcgctggccgtggggccggcgatggcgcactttggctggtcgtgggacgactgggaccgcctggccgccgcgaccatggccggccacctgcttgaatgcggggcgcaggtcagcggcggctactttgccgatcccggcatgaaggacgtacccgatgtgcatgcggtgggcttcccgatcgcgcagctggccgaggacggcggcatcgagatcttcaaggccgccggcaccggcggctgcgtcgacctgcgcacggtcaaggagcagctgctgtacgaggtccacgatccggccgcgtacctgacgcctgacgtggtcgcagatattggtacggtcacggtcacgcaactggcccccgaccgcgtggcggtgcgcaatgtgcgcggccatccccgcccggcgcagctcaaggccaatgtgttcagccacggcggctggctggccgagggcgaaatctcgtacgccggccccaatgccgccgcccgcgcgcggctggccgccgacatcctgcgccggcgcatgcagctgctgggccatgacgcgcccatccgcttcgacctgatcggcgtgctcagcgtgctggccgacgatggcggcgccatgttcgcccagcgccagccgcatgagcaagcggcgcaggacgtgcgcctgcgcgccgcgttggcgcacgacgacctgacggtggcgcaggccctgcagcgcgaggtcaatgcgctctatacctgtggcccggccggcggcggcggcgtgcgcaccgcgcagcgcgcgcgcctgaatgcggtgtcgtgcctggtaccgcgcgaggccgtgacggccacgcatagcttcatcgcctgaggaggttccgaccatgactgacactgccgcgctctaccagttcgcacacggccgcaccggcgacaagggcaaccgttccaacatcagcgtgatcgcctacgacgcgcgcgactacgaccacctggtcgagcacgtgaccgaggacgccgtgcgcgcgctgttccgcgagcgccggcccacggccgtcacgcgctacctggtgccgtcgctgcaggcgatgaacttcgtcctcgatggcgtgctcgatggcggcgtcaacgacgcgctcaacctcgacacgcacggcaaggcgctgtcgttccgcctgctgcagcttgagatccccgtgccgccgcggctcgtgtccggcaccgcggctagccactgatccaccgcttcacaccgacaacgacttctacaggagaccacgatgtacccatttctcaagccactggccgtcgccgcacttgcgctgatcctgcccgcggggcaggcctgggccgagttcccggacaagccgatccgcttcgtggtgccgttcgccgccggcagcgccaccgaccagctggcgcgtgccattggccaggccatcaccgtggacagcaaggtcaccgtggtggtcgacaacaagccgggcgcgaatggcttcatcgccgcgtcggacgtggccaaggccgcgccggacggctacaccgtgctgatcagcaccaacaccacgcatgcggccaacgagcacctgttcaagaagctgccctacgacccggtcaaggactacgcgccgatcaccgcgctgggccgcggcggccagatcatggtggtcaacccgcaggtgccggccaagaccgtgggcgagttcatcgcgctggcaaaacagcagccgggcaagctcagcttcggcagcggcagctcgtcgtcgcgcattgccggcgagctgttccagcagatggcgcatgtggagttgctgcacgtgccgtacaagagcaacccgctggccatcaccgacctgctcggcaaccagatccagatgatgatcacggacacggccaccggcctgccgcaggtcaagagcggcaagctgcgcgcgctgggagtgtcgggcaagacgcgctcgccgctggcgccggacgtgcccaccatcgacgaagccggcgtcaagggctacgagatgagctactggttcgcggcctatgcgcccgccggcacgccgcagccggtggtggcgaagctcaatgcgatgatggtcaaggccgcgcgcggcgatagcgcggctggcttctacaagtcgaccggcactgaggtgttcaccagcacgcccgcggagctggcgaagttccagttgcaagagtccggcaagtggggacgcatcatcaaggcggcgaatatccagccggagtaaacgcagggcagcgcaagctcccatgcatggaaaacggggccaaacggccccgttttttacgcagaagtaggtacgctttggtgcttgcggccttgatggacaagggccggctaagatatgcctggccgcgcggccttgccgctccggcctactcctcgacaataccaaccagaacaggaacaggatatgaagcagcagtccgtggtgtgccatgcaaccttacatcccggccgtcccccggggctgcgccaggccgtattgcgtgccgccatcgccgtcaccatgggggccgccgtgcttcccgccatcgccactgcgcagaccgccacgccgccggcgcagcagaagacccaggtgccgggctactaccgcatgatggtcggccagctcgaggtcacggcgctctatgacggctacatcgacctggacccgaagatcctcaggtacaccagcgcgcgcgaggtgcagagcctgctggcgcggatgttcgtcgaatcgacgccaggcatgcagaccgcggtcaacgcctacctgatccataccggcagccacctggtgctggtcgatacgggcgcggcagcctgcttcgggcccacgctcgggcgcatcggcgaaaacctgcgcgcggcgggctacgcgccggaacagatcgacaccgtgctgctgacccacctgcacggcgaccacgcctgcggcctggccgccaacggcaaggcggccttcccgaacgcaaccgtctatgtcgacaaggccgatgccgactactggctcagcgaggccaatgccgccgccgcgccgaaggaggcgcagggcctgttcgccatggcgcgcgccgcggtcgcgccgtaccaggcggcgcagcgcttccggcccttcaacggcggcgccggtgtcgagcccgtttccggtgtgcgcgcggtgccggccaatggccatactccgggccacagtggctacctgttcacctcgggcaaggacagcctgctgctgtggggcgacatcgtgcacagccatgcggtgcagttccgccgcccgcaagtggcgatcgagtttgacgtggacagcaaacaggccgtgatcacgcgccagcgcatcctggccgatgccgccaagggccggctgtgggtggggggcgcgcatatgcctttcccgggccttggccatgtgcgccgcgatgcggccgggtatgcatgggtgccggccgagttcggtccaatccgcaacgaccgctagccgtccacgcacggccgtcgcttttcgcctagagtcatcccagcggcccgtatgacgtacgggacgggtggtcgtgtctactgcggaggatttgcgatgaacgccaaggcatcccgcttcgatcctgcccgccgccgctggcttggtgccggcgccgcggccctggtgctggccgtgcccctgccgcgcgccgcgcgcgcccagcctgggccggcggccagccgcgaggccaccgcgcagcgcatcggcgtgatcggctcgggccgcatcggcggcacggtgggcgggctgtgggtcaaggccggacacccggtcctgttctcgtcgcggcacccggaggcactcaagccgctggtggaagaattgggtacgctggcgcgcgccggcaccgtggccgaggcgattgcgttctctgacgtgctgttcctggccacgccctacggcgcgctgccgcagctcagccgcgaccatgccgatgcctggcgcggcaagatcgtgctcgatgccaccaatgcctatgagcaccgcgatggcccgatcaccgaggaggccaggcgtgacggcatcggcatcaccaccgcgcgctacctgcgcggcgcgcgcgtggtgcgggccttcaacttcatgggggcggcacagtttgccagcgagcaccaccgggcgggcggcctggtggcggtgcccattgccggcgacgacaaggccgcgctcgatgtggccgcgcagctggtgcgcgatgcgggattcgaaccggtggtggtggggccgctggcgagcgcggatcgcttcgcaccgggcgggccgctgttccggcaggtgggtacggccgaagagttccggcgcaagatgggcgcccgctgacgctgcgccgggcgcgctggcgcatcagggccggcgccgctccattgccaccatcgacggcgtaaagccgagctggccgaagaatgcggcttcggaggaacgcgccgcgcgcagcatccaggtgatgtcggggtcgttgcccacgatgtgccgcaccagggcgcggccgatgccgcgccggcggtggctgggcgcgacggcaaccatcgacaggaagccgtcgcagacgtcgtcgcacagtgcgcgggcaaagccgacgatctcgccgtgctccaccgccacgaccacccgttgggagttggccaccagccgtgcgaatttctccgggccgcccacccggtgggcccagccgttggcgatcagtagttgtctggctgcctcgatgtcgtcaggcaacaggttacggatttccatcggcggctctcccagtaaagcgtgtacggcccctcgccgccccctgccacgaggggcgccgcgagtcgagaacggcacgggaacccgtgccgcgcaattggcggagtgtagcgagcgggcgcgggcgcgtcaatttggcttccggcggggtcgggtgctgctcacgccggcgcgccggcgcggtatcatggcctccatgaacgcccccgtcttttcctccgcacatccggccgatcagcttgccgagttcaccgacgcggatgcggcgatcgcgcgcatccgcgacatctacgaagcttctgtcggcgccgtgcgcgcgcgcttcgatgccttcgccagcggcaagccgctgccctcggccgcgcatgcgtgctatccgtacctgggcatctcggtcaatatcgagaccatggtcaccgacagccggccgtcatggggcacggtggcctacccgggcgtgtatggcaccaccgtgacccgccccgacctgctggcggactactaccgcgaccagatcgagcggctgatgcgctatcaccgcgtgcctgtggtggtagggctgagccggcgcccgatcccgctgccgttcgtgatcgaggcttcgaccaccgacatcagctacacccaggcgcgcgagctggaggcatcgttcgtgctgcccgagctgagccgcatcgacgacggcatcgccaatggcacctatgagccgatcccgggcgaggcctggccgctgtcgctgttcccggccgagcgcgtggacctggccctgcagcggctgtaccactacaccggcacggcaccgcagcatttccagcgcttcgtgctgttcaccaactaccagcgctatgtcgacgagtttgtcgagctgggccggggcctgatggccagcagcgacggcggcggctacacccgctttgtcgaacccggcgacgtgatgcaggaactgggcggcgcggaacccgacgacgcctcgcgcccgcgcgcgctgccgcagatgccggcctatcacctggtgcgcgaagacaagctgggggtgacgctggtcaatatcggcgtgggaccgtccaacgccaagaccatgaccgaccacctggccgtgctgcgcccgcattgctggctgatggtgggccactgcggcggcttgcgccgctcgcagcagctcggcgactacgtgctggcgcacgcctatgtgcgcgacgaccacgtgctcgaccacgacttgccgccgtgggtgccggtgccgccaatcgccgagatccaggtggccttgcaggaggccgttgcgcgcgtgaccgggctgtccggcaacgagatgaagacccgcatgcgcaccggcacggtggtctcgaccgacgaccgcaactgggaactcaagtccaagtcgctgtatgcgcgcttcaaccagtcgcgcgcgattgccatcgatatggaaagcgcggcggtggcggccaacggcttccggctgcgcgtgccctatggcaccttgctatgcgtgtcggacaagccgctgcatggcgagctcaagctgcgcggcatggccaacgccttctatcgccagcgtgtcagccagcatatgaccatcgggctggaggcgatccgcatcctgcgtgagaacggggtggagcagctgcattcgcgcaagctgcgcagtttcgacgagccggcgttccgctagtcgccccgctcccggcagccgcaaaaggcaacttccgctcagtggctgatcatccagggccgccccccgggggccttggccgcgtccgtgcgcccggccagccggaccgggccgcagcagccacacccggcgccatgcgccgacgatgacctgggctcggccgcgctgcgctcattgaccgcatgcgccgcgcgcgccgacctcgccatgctggccagcgccggtgcggccaccagcgcgcgcgctgccagcgcgccgcattgcgggcaggccgcggcttcgtcgcgccgcgacattggccgcatcaccgcgaaatcgccacaatcttcacaccgatagtcgtaggtgggcattgcatctccgccagtgggatcacgacaaccaccttccaggctaggccaggtcgggggaaaggggcaggtccacgccgccctggatcatcttcaccggcccgctggcgttgggccggatatcgaaatcgaagatctgcgtcggcagccacagcgtggcgcaggcattgggaatatccaccacgccactgatatgcccctgaaccggcgctgtgccgaggatcgaataggcctgggcccgcgagtagccgaacctgctcaggtattcgatcgcgttcaggcatgcctgccggtaggccacgtgcacatccaggtaatgttgcttgcctgactcatcgacggagatcccttcgaagatcaggtagtcgttgtagctcggcgtgatcgggctgggcttgaagatcggattgcggatgccgtacttggccatgccgcccttgatcagcgacacgcgcatatgcacccagccggccatttcgatggcgccgcagaacgtgatctcgccatcgccctgcgagaaatgcaggtcgcccacggacaggcccgcgccgtccacatagacggggaagtagaccttggcaccgcgtgacaggtccttgatgtcgcagttgccgccatgctcgcgcggcggcaccgtgcgcgcgccggccgcggcagcctgggcgcgcgcatcgccttgcagcctgcccatgtgcgcggtggcggcaaacggcggattggccagggggggcacgcgcccgggatcggtggcgatgaaatccatctcgcgtttgttccacgtctccagcatggcctggtccggcaggcagccgatcagccccgggtggatcagcccggcaaagctcacgccggggatatggcgcgacgaggtgtagagcccgtggaagtcccagatcgacttctgcgcctgcggaaagtggtcggtcaggaagccgccgccgttctgcttcgaaaagaagccgttgaagccccactggctttccggcctggcgccgatgtccagcagatccaccaccagcaggtcgccgggttcggcgccttccacgcctactggaccggacaggaaatggacgatcgacaaatcgatgtcgcgcacatcgtcggccgaatcgttgttcttgatgaagccgccggtccagtcgtaggtttcgaggataaagtcgtcgcccggcttgacccagcaggccatcgggatgtccgggtgccagcggttgtggacgttggggttctcgtacggcgattcggccagatcgaccttgatcagggtgtccgtcatgacgttgcctcctgggtggaaaagggggtgggggatcggggatgggggagttgaaaccggttcagaccgacagcagttgccggatgtggtccacatccgtgctgttgcgctgcgtctcgtgtacgaagcggccgccttcgatgaccagcagccggtctgccacgtccagcgcaaagctcagcacctgctcggaaaacacgatcgtgatgtcgcgcgtgcggcggatctcgtccagcgcgcgggcgatgtccttgatgatcgacggctggatgccttcggtgggctcgtcgagcagcagcaccttgggatcggccaccagcgcccgcgcgatcgccagctgctgctgctggccgccggacaggttgccgcccttgcgccggcgcatgtcgaacagcaccgggaacatcgcgaagatctcctcggggatgcgccggcgctttccctgcgccatgccggtgaggatgttttcctcgacgctcaggtgcgagaagatcatgcgcccctgcggcacatagcccaggcccgcgcgcacgcggcgatagctctcgtcgcgggcgacatccctgccatcgatgtagacctggcccgagcgcaccggcagcatgccgatcatcgccttgaacagcgtggtcttgcccatgccgttgcggcccatgatggccaccgtttcgccctgcgcggcggcaaacgaaacgccgtgcagtgcctcgctctggccatagttcacgaccacgttgtcgactgtgagcatgtgagattctccgtcggtagcaggtggccgcgtcaatggcccaggtagacgtcgatcacgcgcgggtcgttctgcacctgggtcatcgaaccctcggccaggatctttccctggtgcatcacggtgaccttgtcggcgatctgcttgacgaagtccatgtcgtgctcgatgacgatcacggcgcggcccttgctgacgcgtttgagcagttcggcggtctgttcgcgctcgcgcacgctcatgccggcaatcggctcgtcaagcatcagcaacctgggctcttgcatcagcagcatgccgatctccagccactgcttctggccatgcgacagttgcgcggcctcgcgctccagcgcatcggccaggccaatctccgcggccacctcggccacgcgctggcggacctcgacggtggcgcgaaaagccagggcgcccagcacgccgcgtccgcgcgggaacgacaccgccaggttctggaacacactcaggttctcgtagatcgatggcgtctggaacttgcggcctacaccggcgcgtacgatctggtactcgggcaggcccgtcagctcgcggttggcaaacttgatgctgccgccgctggcgcgggtcttgccgcacaccaggtccagcagcgtggtcttgccggcaccgttcgggccgatgatcacgcgcagctcgttgcggtcgacatagagcgtgaggttgtcgatggccttgaagccatcgaacgagaccgtcagatcttccactgccagcatgaagtcggtattgctcatggtgtctgcctcgcgggtcaggccgtcgtggccgggatgcgctcggccggcgcgggcggatcgtcggcacgccggcgcgccaggtacttgcggtagaggccggccagcccgtcagggaaggccaccaccacgccgatgaacagcgccgccatcaggaacagccagagatccgggaaactctcggagaaataggtcttgccggcattgaccagcaaggtgccccagaccgcgcccaccaggctcatgcgcccgcccacggccgcgaagatcaccatttcgatcgacggcacgatgccgacgaacgatggcgacatgaagccgacctgcagcgtgaacatggcgccgccgatggcggaaagcgcggcggccaggcagaacacgaacaccttgaacatcgccacgtcgtagccggagaagcgcacgcgatcctctttgtcgcgcatggccagcagcagcacgccaagcttgctgcgctggatccagcggcacagggcgacggcgccgaacagcagagccacgttgacgaagtagagattgagcctggcgctgtccgtgcggatgtcccagccgagcatcgtcttgaggtcggtaatgccattgacgccgccggtatagccttgctggccgatgatcagcaccgacaggatcagcgccaccgcctgggtgatgatcgcgaagtagaccccgctgacgcgacgccggaacatggcgaagctgactacgaaggccagcagcaccgggatcgcgaccacgccggccatcgcgaacggcaggtgccggaacggctcccaccaccacggcagcgcgctcagctggttccagtccatgaagtcgggaatgcccggcgtggactggatcgccgtgctcctggggtcggatgcttcgagcttcaggaacatggccatggcgtagccgccgaggccgaagaacacgccttgcccgaggctcagcacgccgccgtagccccacagcatgaccaggcccacggccacgaaggcgtagctgagatacttgccgaccaggttcaggcggaacacgtccagcgccagcggcatggccaccagcagcaccagcgcaagcagtgcatagccggcccattcgccgccggcgcgcagccgctgcagcaggggcaggatggatttcgaagggcacatcgtcgggctccttggcaatggttcagcgacgcaccgccggggcgaacaggccttgcgggcggatcatcaggatcgttacgatcagcagcagcgtcagcacgcgtgccattgaccccgtcatgaagaactccgtgatcgactgcgtctgcgcgatgccgaaggccgacgccaccgtgccggcgaggctggctgcgccgccgaacgtgaccacgaggaaggcgtcgacgaggtagagcgagccgctggtcggtcccgtggagccgatcgtcgtgaaggccgcgccagccacgccggcgatgccgcagccgatggcaaacgtcagccggtcggtgcggcgcgtgttgatgccggcggcgttggccatggcccggttggcggtggtggcgcgcacgcgcagcccccagcgcgagcggtacagcgccagccagaccagcccggccacgcacagcgtcagcgccatcacgaacaggccgttgatcgggatatcgaggccgggggcaggcgcccacgaacccatcagccagtcgggcagcgtcgggctgacttccttggggccgaaggtcgaacggaatgcctgctgcatgccgagcgacagtccccaggtggccagcagcgtatccagcggccgcttgtagaggtgccggatcagcgcccattcggccagccagccggcactgaaggcaatggcaaacgcggcgcaaatggccacggggaagtaatggggcatccacgccggcgccaggcgctcgaccgtggtggatgccaggaagatggtgtaggcgccgatggccatgaactcgccatgggccatgttgatgacacccatctggccgaagatgatggccaggcccagcgccatcagcagcagcaccgagaacaggctcagcccggcaaagccctgcatcagggcaatgttcagcatgtcggacagattcatggaagacggctccggcggtcatcggatcaggaaggcgcctgccggcgccggtacggcaaagcgcttactggtagcccttcgggaacgggttgggcggaatcagctgcggagattcggccaccaccttgaactggccgtcaagctgcgccaggcccacccgcgtcctgctccacaggtgatggttggtgtcgaccttgacgtagccttccggcgcggttttcagctcgatgccgggcgacgccgccacgaccttgtcgatatcgaagctgccggccttctcgacggcggccttccacagccacgggcccaggtacgcggcctgggtgacgtcgccgatcacggccttgccgccgtatctggccttgaaggcatcgacgaactgcttgttgttggcgttgttcagcgactggaagtacttcatggcggcatagaagccggcgatgttctcgccgccgatgccgagcacttcgtcctccgtgaccgagatggtcagcaggaactgcttgtcggcggtgatgccggcagccttcaactgcttgtagaaggccacgttggagccgcccaccacgatcgcgtagatgcagtccggcctggccaccttgatcttgttgatcagcgagttgaagttggtatgccccagcgggtagtattcctcgcccaccaccttcagcttcaggaagttctcgatatgcttgcgcgcgatcttgttcgacgtgcgcggccagatgtaatcggagccgatcaggaagaagcttttggcgttcttctgcttcgcggcccagtccagcccccagatgatctgctgcgtggcctcctggcccgtgtagatcacgttcttggattgctcaagcccctcgtagaacgtggggtagtagagcaggccgttctctttctcgaagaccggcagcaccgccttgcgcgaggctgaagtccagcagccgaacacggccgcgacgcggtcattgacgaggagcttgcgcgatttctcggcaaaggtcggccagtcggaggcgccgtcctccttgatcacccggaccttgcggcccaggatgccgcccgccgcgttgatctggtcgatggcaagttgttcggcctggatcgagccggtttccgaaattgccatggtgcccgtggccgagtgcagctggccgacggtgacttcggtatcggtcacggccagcctggtggtattgaccgtggcggtgggcaggctggcgccatgagcctgcgccgccatgccggccagcggcagcgcgggcagggcggccagtccctgcatcaggcgacggcgcggcagcgagaccgcgccgccgtcgggtgtggaaggggaaccgctactgtctttgtcacgcatgatcgacgctccttggaggcgaggtgagattggctgatccgtcttggtcaaagcactcctgcgggccgatcatgctgcgtcgccacactggcggccatacgtcattcaacgtacgcgggggagagtgtggcggcggccttcgcaaccggcaatggcatgtcgcctcacggcatggctcttgcgtcagcgcggcatcactccctgccaggtgcccccggccccttccaaccatgtcgagcgccagccagccagtccagcgcatcagcaagatccggcgcgactacaaccgctgggtggccgacgagacccttgaggactacgccctgcgctttgcaccaaagtcgttccgaaaatggagcgccttccgcgtggccaataccgcttttggtgcagttgctttcctcgcgctagaggccatcggcgccgccatcacgctgagctacggctttaccaacgcgatgtgggccatcggcgcggcaagcctggtgattttcctgaccggcctgccgatttcctactacgcggcccgccacggactcgacatagacttgctggcgcgcggtgccggcttcggctacctgggttcgacgatcacttcgctgatctatgcgagctttaccttcatcttcttcgcgctcgaggccgccatcatggcgcaggccttcgagctgctgttcggcctgccacggcctgtcggctacctgttgtcggccattgtcgtcatcccgctggtcacccatggcgtgacgctgctgtcgcgcatccagctgtggacgcagccggtgtggctggcactgctggtgctgccctacgcactgatcctctggcgcgagccgcaccgctatgcggaattcctgtccctgaacggccggctggccgatggcgatggattctcgtggcaggcattcggggccgcggccaccgtggcggctgcgctgatcgcccagatcggcgagcaggtggacttcctgcgcttcatgccgccgctgacgcagcgcaaccgcgtgcgctggtggagcgcgctgatcgcggccggcccgggctggatcgtgccgggagcagcgaagatggcagggggtgcgttcctcgcctttgtggtgctgcagtcggaactgccgattgcccatgcgctggagcccactcagatgtacctggctggctttgcacacggactcggcgggagctggccgggatgggtcgcggtggtgctgacgggactgtttgtcctcatctcgcagaccaagatcaatatcaccaatgcctatgcgggctcgctggcgtggtcgaacgtgttcgcgcggctcacgcacagtcacccgggccgtgtggtgtggctggcgttcaatgtgctgatcgccgtaatgctgatggtgatgggcgtgttcgaggccatggagcaggtactggcgctttatgcccacctggccgttgcgtgggtcggcgcgatctgtggcgacctcgtcatcagcaagccgctcgggctttctcccaaggacatcgagttccggcgcgcctacctgttcgatatcaatccggccggcttcggcgcgatgatgctggcctcggcgttgtcgatgctggtccacctgggggtgtttggcgacacactgcgaccggcgtcggttggtgtgggacttctgctggcgatcgtgttgccaccgttgatcgccatcgccacgcacagccgctatttcgttgcgcgcacgccggtcgattttggccggcgccacgccgtgatccgttgcgcgatctgccgcaatccgttcgagaaggaggacgtggcagcctgcccggcctatcgcggcccgatctgctcgctctgctgcacgctcgacgcgcgctgcggcgaccggtgtaaaccgggcgccagcgcacaggaacagatcgccactgcgctcacgcgcgtgctgccggccggcacgccaccagtcatggcccgccggatcggcaagttcggcctgatgctggcggggatggtgtttgccttcggcaccttgctgtggctgctctatacgcaggagcaactgtccggcccggtggtgctggctgccgcgccccgtgccagcctgttcctgaagatcggcgccggcctgatgctgtttgctgccgtggccgcgtggtggctggtgctggccaatgagagccgggcggtggcgcaggaagagtcggagcgccagaaccagttgctgcagaaggaaatcgacgcccaccgccgtaccgatgcgctgctgcaaagcgccaaggaagtcgccgagcaggccaacctggccaagagccgcttcatcaccggcatgagccatgagatgcgcgcgggcctcaattcgatccttggctactcgcagttgctgctgcgcacgccggcgctgcccgccgcatgccgcgaggacgtgcggaccatcggccgcgccggcgagcacctgtcgagccttgtcgacggcctgctggagctgtcgcgcatcgaggcgggcaagctgcggctggaacaggatgcggtggcgctggaagacctgctggacgaactcgtccgcatgttccggccactggcagcggtgcgcgggctggcgttccactatcgcgtgaccggcaagctgccggcgcacgtgcatggcgacgccaagcgcttgcgccagatcatcatcaaccttgtcaccaatgccatcaaatttacggagcacggcgacgtgtcgctgaccgtgcgccaccagcgcgaactggcaatgatcacggtcagcgatacgggtcctggcattgccgcggaagaccaggcgcgcatcttcgatccgtttgaacgcgccacgccgcatgacgatcgcgaaggcatcggcctgggcctggccattgtgcgcctgctggcagacctgatgggtggagacatccgcgtgcgcagcgcaccgggccaaggcagcgagttctccgtgcggctctatctcccgaccgtggccgcggcggtgacgtgcccgcagcgggcgcccgcgccgccaatgccggcgggagcgcgcgtgctgatcgtcgacgaccgcagggcccatcgggcggtgctgcgcggcttcctggcgccgcacgggctggccgtgcatgaggcgggggatggcgccggcgtgctcccggcgctgtgccagtggcgtccgcacctggtgctgctcgacctgaacctgcccgatgcatcgggttgggacctgtgccgccagatccgcgccgaagccaatgcgccgcaagtggtgatcgtctccgccaacgcgcacgaaaacacggaagaagcgcgcgcgctgcacggctatctgggattcgtcagcaagccggtgcgtgagcgcgaactggtcgagatggtccgacgcgcgctgacgcagccgcagcctgcgctcaccccggcgccggacctgttgcgtgagctgctgcaactgggcgccaccggccggctgcgcgcgctggaggcccagctttcagaactggcggaaggcggcggcgccgtggccacgtgggcactgcagatgctggcgctcgcgcggaccgatggcactgccctgaccgcatcacttggcgaggcgctccatgcatcccgaacctgacacctttcgcccgttgccgacgatcgagacccgcgtactggtggtcgacgacgatgccgacgcgtgcggcttcctgacgcgcgcgctgggtggcgaagccatgctggtccacaccgccgcgaacggcaacgcggcactggatgcgctgacgtccttcgcgccggatgcggtgctgctggacgtggacatgccgggcatggacggctttgccgcctgcacggcgctgctggaccgccacgcggacctgccggtgatcttcatgaccggacttggcgataccggtcatatcgtgcgcggtttcgaagtcggcgcatgcgactacgtgaccaaaccggtggcgattgccgaggtggtggcgcgcgtgcggtctcatgcgggcaaggcacggctggcgcgcagcgcacgggaggccgtattcggcagcacggtgccgatgctcgcggccggcatcgacggccggctcctgtggataaacggcagcgcgtcagccttgctgcaggcccagggatggccggtagcgattgccggcgcggtactgcctcccgcgctgcgcgacgcggtgttccgcctctgcagcgaagcggaaactggcgctgatagtcttcacctgcgccggttgacaggcgaggcgggcgacgtggtcgtggtggaactgtcgtgcagcggtctggccccggccggcccggccctgacactgcgcgaggccgaggtgatggcctgggtggcgcgcggcaagaccaatcgcgatatcgccgacatcctcggcatgagcccgcgcacggtgaacaagcacctggaacacatctacgagaagctcggcgtggaaacgcgaacggcggcagtcgccgccacccggcgcaacttggggacggcgtgacgtgccgtgcgccaaggcaagaagggccggcgttgccggcccttcttgccagtcggatcccgatcagaagcggtaacccacccccatgctgaacagccacggatccaggttcaccttggataccttgacatcccccgccttcacatcgctcgacagccagatcttcttgatgtcggcgttgagaaaccagtttttggtcagcttgtagtccatgccgatctgcagcgcgggaccgacgctccagctatcgagctgcagcgagttgttggcgatgtccgcgccccagatgcgggtgaagttcaggcccgcgccgatatacgggcggaaggtgccgttggggatgaagtggtactgcaccagcagcgtcggcggcagatgcttgaaggtgccgaccttgttgccgtccaggtagacgtcctgcttctgcggcactgtcagcaccagttcggcggcgatgttcggcgtgaagaagtaggtgacgtcgaactcgggaatccacttgttgttgaccgtgatgcggtccgacgggccgacgccgccgacggggtcggagctgttggccatgtcgagataggtgccgcgcaggcgcaccatccagttgccctgggcatcgtccgcggcggcggcaggggtggcgaaggcgccgagcatggcgcaggcggcgatggcggaacaggtgacccgggtgcggagagagagtgttttcatgaggttctgcttggtctggtatcaaatccggacccagtttggccgagcaggccgggttgggctttgacccaagacaagtagaagggaacgtgggctggctgcgtcgcgcaggcgctacagcgaggaaggcgccgtggtgtgccagctgcgccgacgcttctaaacacatgcggaattattcgtggcgcggtgcgatgctgccccttacgctgtgcgaaagatccgagcacgcatgcagcgtgtgcggatcggcaccgagcatgtcgtgggcgtccgcaagggcgtctttccgggtgtgccccgtgggggcggggcacaccggttttcttgcggcggcttgcggtgtcaggcgtcggcggcctcggcggactgcggggcctgcgccgcgccaaagccggcctgcaggtgccggttcacgcccgagatcaccgcgcgcagcgatgccgtgaccaggttggcgtcgatgccggcgccgaaccctgtcggcgaatcgcccacgcgcacttccacgtagcaggccgcgcgtgcatccgcgccggcgctcatcgcatgctcgtggtaatccatcacgcgtaccggcaagtccagcgcattgacgaaggcatcgatgggcccgttgccggtgccgcgcacgctgcacggcttgccgtcgcgcaccatctgcacttcgatctccgtggcgccgccgctgtcagataccagctggtgcgatacatagcgcagcggtgtctgctgcgcgaggtactcgcgctggaacaaaccatgaagatcatcggcactcgcctcgagcccggtgtcgtcggtcatggcctgcaccgcgcggctgaattcgatctgcaggcggcgcggcatgtagatgccatgcacctgctccagcaggtaggccatgccgcccttgccggactggctgttgacgcggatcaccgcgtcatagctgcggcccaggtcggccgggtcgatcggcaggtagggcacttcccagatgccgtccggctgctgctgtgcaaagcccttgcggatcgcatcctggtgcgagcccgagaacgcggtgaataccaggtcgcccacatacgggtggcgcggatgcaccggcagctggttgcagtgctcaacgcactggcgcactgcgtcgatatcggagaagtccagcccgggtgccacgccctgcgtatagaggttgagcgccagcgtcaccaggtcgacattgccggtgcgctcgccgttgccgaacaggcagccttcgacgcggtccgcgcccgccatcagcgccagctccgcggcggccaccgcggtgccgcggtcgttgtgcgggtgcactgacagcgcgatgtgttcgcgccgtgccaggcggcggtgcatccattcgacctggtcggcgaacacgttgggcgtgctgcattcgaccgtggtcggcaggttcaggatcattggccggtccgggccggcctgccaggcggcagagacggcgtcgctgacttccagcgagaagtcgagctcggccaggctgaaagtctcgggcgaatattcataggcccatgccgtgccaggcatggcatcggtcagcgacctgatcaggcgcgtgcccgagaccgcgacctccttgatctcttcacgcgaggcattgaagacgatgcgccgccaggctggcgcgatcgggttgtacaggtgcaccgtggcccgcgctgcgccgcgcacggactcgacggtgcggcggatcaggtcttcgcgcgattgcgtcagcaccacgatgttgacgtcttcggggatgcgctgctcctcgatcagcatgcgcacgaagtcgaaatcggtctgcgaggcggcggggaacgccacttcgatttccttcaggccgattttcaccagctgctcgaagaagcgcagcttgcgcgccgggttcatcggctcgatcagggcctggttgccgtcgcgcaggtcggtgctcatccagcgcggtgcgcgcgtgatggtgcgggcgggccaggtgcggtcagggatgtcgacggtggcggcggggtggtacttggtggcgggattgctgagcatacggggtctccttcctcgctaagggaagtaaaggaaaaacggaagaaacggtggcgaaaggctgccgaactgccacggggcactaggcccggcaaccggtcgataggcttagcagtagcgaggaagcgcgcagggcgcggcccgatgccagggcagccagcacgcgcgcgcgggcagcgatgcgggacgcatcggcagcctggctgagtgtgctggtgtaacggttcatcgtgcctggaggaggagggccggggccgctcgtggttggtgcgcatccggcaggagccggatgactggcaaaggttagtcgacaaggccggccccggtcaagcgtgggggagcgccgggtgcgaacgtggcccgatcgggcgactgccatgcgcgggttgcgccaaacggctggggccaggttgcggccgggatcctgccggtcatgtttgcctcgcccgaatggcggtgccgctgcgctgaaaggatgaatcacgcgcatgctctgtgcgctgcgcctcagtcctctggccggtattgcgctggcacctttgtgcctaggctggtagcgcgggaaaaaacacatgactgggggggaacatcatgagactgagaacgtgggcatcctggctggcgggcgctgccatgaccatgctgctggcagcgtgcggtggcggcggtggttcgagcacgcccgccacgccaaacgcaggcggttccacgccgctgacctatacggtgaagatgagcgtgacctcgggcgaggtcggcgtcggccgcacgatcaccatcagcgcgctggcagtggacagcaacggcatcgacgtctccggcaacaccaccttcaactggaccagtaccgacagcggcattgccaccgtggagccgagtgccaccacgccgggcagcgccgtggtcaagggcattgcaaccgggacgaccaccgtccaggtggtggcgagcgtcaagggcgccgacaacaccacggtgcagctgcccgcgcaatccgccaccatcaccgtggtgccggcctcggcgctgagctacagcctggcgatcccgaacagcagcctgtcgatgagcgacgggcaggagctgccggtcaaggtatcgctggtcgacagcaacggcgccgatgtgtccgccagcgtcaacagctgggcatggtccagcagcggctccgcggtccaggtcactgccagccagaacagcgccacgctgaaggcgagcaacagctcacccactgccgtggccacggccagtgtctcggtatcggtgacagcaccggacgggcatgccattgccgggctgatcgcggtgacagtgcagacgaacggcgccgccgcctatcgcgtggtgacgattaagggcggccgcgaggtgaatgcgctgcaggtcttcagcaaccgtccggaaaccttcacctcgcgtgtgctgcgccacgatggccaggacgtgaccgcggagttcgacggcgcctggacctacacggcgacctcggccacgctgtccgcatcggacgcggcgggtacgcatgacgccacggtcagcaccagcctggccaacgacaagggtccggtccagagcagcctgacggtgacggctgtcagcaccaggctcggcgaacgccgcagcgccacgctgacggtgaccgagaacccggtctgggcgctggttggcgacaaccaggatccgatgacgctgctgctgatgccaccgatgagtatcccggtgaccgcgcgcatgaagcaccttggcgacgatgcgcagtacaccgcgtgcatcaactgggcgtggaccagcaccggcccggtggagttgtcgcctggcgtcgcggatcatcagaagaacgtcactggcacagcgcagggcgacttcactcttaccgtgacctgtaatgccgtcgccgacaatacgccgctgaagctggtcttctacggtacggtcaagtaagcagcaggttcccgcgcctggcgaaacgccctccatccggagggcgtttcgctttgtgggcaaattgcaggctgccggcaaagcgtacccgtttctgcgtgaccggcgccaagcgtttcaggtgctgccggggcaggccagcataggcgtcgggacaaggctgagcctgcctttgcgggacgtcccctatatgcgcaccaggcaagccagtgcgcaaagcgtacccgtttctgcgtgcgaaagtgccagcccttccaggcacgttttatcgccgctggacagcctgcaggcgagcgcaaagcgctgcctccgcgccgggcggaagcagcgggcgtacccgtttctgcgtggatctgtggaggaggaaatcgcgccgttcagcgcttgggcacgaagcgaatcacctgttcggcaggcttgtcctgcgtgccggaggtggtgccggcggtgttggatccgcaggtattgcagccgccgtcgtcgcagccgctggcgcagcccgctgcggctttcggggccagccagcgcaccagccgggcacgccagccggtggcggcgccgccgcccaggcgcgcggccagcgccgccttgacgcgctcgcgcgtgcgcggcgcgtagcgcgcgatcaccgacaccgcgcatgccagcacgatcagcgggaccagcagcgtttcgatggcgtggtagagggtcatggcggcgcggtgcctcagctgaacatcagcgcgacgcggtaggtcacgaaggccgccaggtaggccagcccggtcaggtaggccgccgacagcgccatcaccttccacgagtcggtctcgcgccggatcactgccagcgtggagatgcactgcggtgcgaacacgtaccaggccagcagcgacagcgcggtggccagcgaccattgcgcggcgatcatcggcgccagctgcgtggccacggtctcttcgctgcccgacagcgcatagacggtagccagcgcgcccacggccacttcgcgcgcggccaggcccggcaccagcgcaatgcagatctgccagttgaagcccaccggtgcgaacaccttctgcagcgcatggccgatcatgccggcaaagctgtagtcgatggccggcgcggtcgcgcccacgggcgcggacgggaaggtcgacaggaaccacagcagcaccgtcagcgccaggatcaccttgcccacccgcgacaggaagatgcgggcacgctcccacaggccgatggccacatcgcgcggattggggatgcggtacgacggcagctccatcagcagcggatggtcggtgcggtcgcggcggaagaacttgagcgcgtaggccaccaccagcgcgctgacgatgccggccacgtacagcgcgaacagcaccagcccctgcaggttgaacaggcccatcacggtgcgctcggggatgaaggcgccgatcagcagcgcatacaccggcagccgtgccgagcaggtcatcagcggcgccaccaggatggtggtgagccggtcgcgcgggtcctggatggtgcgcgtggccatgatgccggggatggcgcaggcaaagctggacagcaacgggataaacgagcgccccgacagccccgcgcccatcatcaggcggtccagcaggaaggccgcgcgcggcaggtagccggattcctccagcgtcaggatgaacagaaacaggatcaggatctgcggcaggaacaccaccacgctgcccaggcctgcgaccaggccgtcgaccagcaggctcttgagcatgccgtcgggcaggtaggcgcccagcatctcgccgacccagtgcacaccgccctcgatgccgtccatcaacggctcggcccacgagaacaccgcctggaacatcaggaacagcagcagcgccagcagcagcaggccgatcaccggatgcagcacgatgcggtcgaggcggtcatccagcgcggcggtgcgcgccggcatgctgaccgcggccgccagcaggcggttgacctcggcatgcacgtcaatgtcgttggcgggttccggcgtgaccggcggggccggcggcagggtgtcgtcaagcaggctgaccagtgtcgcggcgccgtcgcgcttcaccgccacggtgctgaccaccggcacgcccagcgcggccgacagcttgtcgcgatcgatctggatgccgcgccgcgcggcggcgtcgctcatattgagcacgaccaccatgggcaggcccaggcggcgcagttccagcacgaagcgcaggtgcaggcgcaggttggtcgcatcgaccaccgacaccagcaggtccgggcgctgctcgccggcacgcctgcccaggcagacatcgcgcgtgatggcttcatcgaggctggccgcgtgcaggctgtaggcgcccggcaggtccaggatgcgcacctggcgcccggccggcgacacgaagtagccttccttgcgctcgacggtcacgcccgcatagttggccaccttctggcggctgccggtcaggcggttgaacagtgcggtcttgccgcaattgggattgccgaccagcgcaatgcgcagggcggaagtggaaggagctgcagacataatccgggggaaggctcaggcagtccgttttgcggacggtttggcggtctggtcgccgccctgcgtggcgggggcgatgctggtgaccgaggcgctggcgaccgctacgccgatgcgtgccgcttccgagcggcgcagcgcaaagcgggtgaagcctacctgtgccaccagcgggtccatgccgaaggggccgtaggcgatgatctgtacggcttcaccggggacgaagcccagttcgcgcaggcggcgcgcgaccgggtctcccggggtggcgtcgtccaccgattgcacaacggcgggcgtgcgccgtggaagttcagacaaccgcatcatgcttccagtccgtggcgcggtctgccgccaagcggtcagcgcgaccacgccggggtgtgtaaatgaaaatcgttttcattgtatcgtaattgaggcatggcgttgcccctcaaagggcgggcacgccggcctgctgccgccgtcattgcgccgcaggaggcaaatgataaccgttcggggtatgggtggctggggggagcgggcggccttggcaacgtttcccgggcctggcgtcacgcgcaaccggtgccgcagggcgctggtagaagtgtagaaggctgcgcatgaattcagcctgatgcagtacagttcggctttgcgaagccgaatgcaaccagcctcatgcagcgccaatcaattactgcatttgtgttattggatgccgtaagcgggcagggttaagcttcaagcacgctgaacaccccgttccacgcgtacttcacaagccatcggtctatggaccggtggctttttctttggggctgccgtgggcggcggctgtcatctcccgcaccatgccgacgaaatggtcgcgcgccggatggtccggcgccgtcttccacgcgcagtagacctccgagcgtaccgacgcgtcggccagtggccggaacgcggccccggccatgccggagcgcgccagcgccgccggcaccaccgccacgcccattccctgcgacaccagcgacaccaccgacagccagtgccggacttcatgccggatctgcgggtagaagccctgcgccgcgcacatgtcgaagatgcggctgtagtagtccggcgaggccttgcgcgagaacagcacgaacggcttgccgcgcaatgccgccagcggcaactccggcagcgcggccagcgcatggtcggccggcaggcagcagacaaagggctcgctgtgcaccagcgtagcctgcagcgtgtccggcacgcggccggtgtggataaaggcgacgtcgagctcgtcgtgcagcagcgcgtcgatctgctcctgcgagttgagctcggtcagcgccacctggatgccgggataggccgcctggaacgcgcgcagcgtctgtggcaagccgcgatacagcatcgagccgacaaagcccacccgcagccgcccgatcgcgcccgcctcgatctcgcgtgccagcacccgcgccgcctcagcctgcgccagcagcgccgtggccgattcgcggaaggcccgtccggccgcggtcagccgcacgccgcggctgtcgcggtcgaacagccgcgccccgaccgaggcctccagctgctggatattgagcgacagcggcggctgggaaatggcaagccggcgcgcggcacgcccgaagtgcagttcctcggccagcacgaggaagtaacgcaggtggcggaattccatggcgatacagaatttatattgatcaagccaattttagaattagacgcgaatccttggggtttcaataatggaggtcaaaggggccgcaagccggcaccgtccaatcccaggagacccgccatgccatccagcgccgtgcgcgacaccacacttcaagccccttgcgccgcatcggccgctgcccacccggtaccggaccgccagggcggcagcctgtttgccgccgaccccgacctgcgcgcgctgctgccgctctacctgccgcccgacctgttcaaccacctgctgccgcacctggagcgcatgggtgcgctggccggcggcgtgctcgacgaactggccggcgtggccgaccgccatccccccgaactcacctaccgtacccgcgcgggcgtggatgcgcagcgcatcgacaagcatccggcctatgtggagatggagcgcgtggcctttgccgaattcggcctggcggcggcgtcgcatcgcggcggggtgctgggctgggacaagcccatgccgccagcggctaagtacgcactcacatatctgtttgtgcaggccgagttcggcctgtgctgcccgctctcgatgaccgattcgctgacgcgcacgctgcgcaagttcggcgacccggcgctggtcgggcgctacctgcccaacctgaccacccaggtgttcgatgatctgtaccagggcgcgatgttcatgaccgagcagggcgccggctccgacgtcgccgccactgccacccgcgcggtgcgcgacgcttcggccgagggcggctggcgcctgctgggcgacaagtggttctgctccaaccccgatgccgcgctggcgatggtgctggcgcgcgtggaggatgaggccggcaacgccgtgccgggccacaagggcgtgtcgctgttcctgctgccgcgcaagctggccgatggcagcgacaaccactaccgcatcatccgcctgaaggacaagctgggcacgcgctcgatggccagcggcgagatccggctggaaggcgcgcatgcctggctggtcggcgaacccggccgcggcttcgtgcagatggccgacatgatcaacaactcgcgcctgtccaacggcgtgcgcgccgccggcctgatgcgccgcgcgctgaccgagggcctgttcatcgcacgcgagcgccaggcgttcggcaagcgcctgcaggacatgccgctgatgcgccgccagctgctcaagctgaccctgcccaccgagcaggcgcgcaccatggtgttccagaccgccgaagcgctgcgccgcgcagatgccggcgaggccgacgcctacccgctgatgcgcatcctgacgccgctgatcaagttccgcgcctgccgcgatgcgcgcaaggtcaccggcgacgccatggagatccgcggcggctgcggctatatcgaggaatggagtgatccgcgcctggtgcgcgacgcccaccttggctcgatctgggagggcaccagcaatatcgttgcgctcgacgtgctgcgcgcggtccgccgcgaaggcgcgctgccggtgctgcaggcacacctggctggcctgctggccgatacgccgatgcatgcggcggcgcgtgccgtgttcgaacgcgccatcgccgccgctgcgaatctggccgcgcaagccgctgaggccggcgccgacggcgaactgctggcgcgccaggcggcctcggcgctgtaccacgtcaccagcgcggtggcgatggcctgggaggccgggcgcatcggctcggtgcgccgcatgcggctggcgcagctggtgctgcgccatcgcgtgctgccgcaggacccgctggccgcgcaggccgagcccgaatggctggccgagaccgtcgcgccggttgacggcaccgtgcgtgccgccggcgcggtcgaccaggtcaacgtgttctgaccggatccacgtccggcaccaatcccccgcaaaaccatcctgccccgaggcgggagacgtcctatacccaggagacaacgccatgaaactctggcaccgcgtagcggccatcgccgcctgctcgctctttatcgcccccgccttcgcgcagaaggactttccgtccaagccgatcatgatggtcgtcacctacccgccgggtggccccaccgatgccatggcgcgcacgcttgccgctgcgctcaagaccagccttggccagccggtggtggtggaaaaccgcgccggcgccggcggcaacatcggtgccgaggtggtggcgcgcgccgagcccgacggctacacgctgatgttcggcacctcggcgccgctggcgatcaacgtcagcctgtaccgcaagatcaactacgacccggtcaagagcttcgcgccggtgatccagatcggccagctgcccaatgtactggtggtcaacccgtccgtgccggcgaagaacgtcgcggagctgatcgcctatggcaaggcgcacccgggcaagctgacctatgcctcgtccggcaacggcgcctcgtcgcacctggcgggggtgctgttcaacaacgtcaccggcaccgatttccagcacatcccgtacaagggcaccggtcccgcgctgaacgacctgctgggcgggcaggtcagcatgaccttcaccgatgtgctgaccgcgatgcccttcatcaagagcggcaaggtgcgcgcactgggcgtcaccaccaaggcgcgctcgcaggcgctgccggatgtgccgaccgtggccgagcagggcgtgccaggtttcgatgtatcggtgttcttcggcgtggtcgcgcccgccggcacgccgcccgaagtgatcggcaagctcaaccgtgcctttgccgatgcgctcaagcagcccgaggtgcgcaagaccctgcaggcgcagggcctggagttcgcgccgtcgaccacgcccgagcagcttggcggcttcgtcaaggccgaggtcggcaagtggcgcgccgtggtgcagaagtccggcgcccagcttgactgaaccgcacaggaaaaccagccatgacccaaaccagccccggcgcgctcgccggcatccgcgtggtcgacctgtcgcgcatcctgggcggcccgtactgcggccagatcctgggcgaccacggcgccgacgtgctcaagatcgaaccgccgcagggcgacgacacccgcacctgggggccgccgttcaaggacggcgtggcctcttactacttcggcctgaaccgcaacaagcgcgtgatgcggctggacctgaccgccgaggcggatcgtgaagtcctgcttgcgctgctggccgaggccgacgtgctggtcgagaacttcaagaccggcaccatggagaagtgggggctgggctacgacacgctgtccgcgcgcttcccgcggctggtccattgccgcgtgtccggcttcggcgcggatggcccgctgggcggcctgcccggctacgacgccgccatccaggccatgtccggcatcatgagcatcaacggcgaggccgatggcgatccgctgcgcgtgggtttgccggtggtggacatggtgaccggcctgaacgccgtgatcggcgtgctgctggcactgcaggagcgcgcgcgcagcgggcgcggccagttcgtcgaggccgcgctctatgactccggcctgtcgctgctgcatccgcatgcggccaactggttcatgagcggcaagacgccgcagcgcaccggcaatgcgcatcccaacatctacccgtacgacacggtggcgaccgccaccgacccgatcttcctggcggtgggcaacgaccggcagttccgcatcctgtgcgagcacctgcggctgcctgcactggccgatgacgagcgctatgccacggcgggcgcgcgctcggtgaaccgcgtggcgctgaaggcggaactggaagccaggctgtgcgagttcgatggcaaggtgctggccgacgagctggtggccgcgggcgtgccctgcgcgccggtgctgtccgtggccgacgccttgcagcatccgcatacgcagcaccgcgagatggtggtggagatggagggcggctacaaagggctgggtgcgccggtcaagctgagccggacgccggcgacgtaccggtatgcgccgctcaccgaaggggacgagttcctggattagacgcgacgttgccgcgcggcaaacgaaaaggcggccatatggccgcctttcttcattgattccggctagctcatcaccccgggatcatccccggcaacaggtaagcctgcaccaccgtcatgatgccgatgatcacggcaaacagcaggctgtgcttgaccgtgaagcggaacagctccgactccttgcccaccagcccggtcgccgcgcaggccacggcgatcgattgcggcgagatcatcttggccgtgacgccgccggtggtgttggcggcgaccagcagcgtgtccgacacgccgatctgatgcgccgtggtgttctgcagcgcgcagaacagcgcattggacgaagtgtccgaaccggtcaggaacacccccagccagcccaggaacggcgagaagaacgggaaggccgcgccggtgccggccagcagcagcgccagtgtcgacgacatgccggagtagttggcgacaaaggcgaatgccagcaccaggccgatcgacagcaccgggcgcgccagttccaccagggtctcggcaaaggtggccagcagcgtgcgcggcttcatgcgcagcagcaccgccgagatcagagcggtcagcaggatggcggtgccgacggcggagagcaggtcgagcttcagcaccgcgtcataggccttgggcgtggccacgatcggcgcggccttgatcaccatctggtccagcccggggatcttgaacttcagcaccgttcccgccagcgcgccattggccgcgaacagcgccttgaacggctgcaggctccacaccgtgacgatggcggtcaggatgccgaacggcgcccacgcgcgcagcgtctgcgccagggtgtagggcgaagccttgcggctggacatcgcaccgccgaagccgccgccgaagccagccagcgcgacggtgccgccgctgacattgccgccggcacgctgcgacgcgctgcgcggctgccataccttcaggaacgcggccagcgacaccaggctgaccagtgccgaagtgatgtccggcagttcgggcccgatatggttggaggtgaagtactgcgtcacggcaaagctgccgccgcacaccagcgccgccggccacgtctcgcgcacgcccttggcgccgtccatcatgaacaccagccagaacggcaccagcagcgacagcagcggcagctggcggccggccatggcgccgatatggaagggatcgatgcccgtgacctgaccggccacgatgatggggatgcccatcgcgccgaacgccaccggcgcggtattggcgatcaggcacaggcccgtcgcatacagcgggttgaagcccaggcccaccagcagcgccgcggtgatcgccaccggcgcgccgaagcccgccgcgccttccagaaaggcgccgaaggcaaagccgatcagcagcatctgcaggcgctggtcgtcggtaatcgacagcaccgaggcgcggatcacgtcgaactggccggtcttgaccacgatcttgtagaggaacaccgcggtcacgatgatccatgcaatcggccacagcccataggcaaagccgaagccggccgaggccagcgcctgctgcgcaggcatgccgtaggcgaagatcgccacggccagcgccaatagcagcgtcacggccgcggcgacatggcccttcatgcgccagacggccagcgcaatgaagaagaacagtatgggaatggctgccgccagcgacgacagccacaggctgcccagcggtgtatagagttgggtccagggttgcacggtttagtctcctgcttcggtggtgtttcgggaaatctttgttttgttgatgaacacagccgcgagcggaaccgctcgcgcccgtgatgacggattactccggctgccccttctccttcagcaagtccgccaggctcttcgccgccggcttcagcggcgtgcggtgctgcgtccatcccatctgcttcgacggcgtcagcgcgcgcagccgcgtggcggcccagcggaacagccggtacgtcgccgggtgcgaatacgcgccgctccagaaacgccacaccaggtgctcgccgcggctgtacttggcgccttggccgcgcagcgggttgacgacctgctctgcgggatcacggttggcctcggtgcgcaggcgcaccagcaattgcggaatcggaatgcgcaccgggcaaacttcgccgcaggcgccgcacaggctcgaggcggtggccaggtcggcggtggcgtccagccccagcaggtgcggcgagatgatcttgccgatggggccgggataggtcgtgccgtaggcgtggccgccgatgcgcgtgtagaccgggcagtggttcatgcatgcgccgcagcggatgcattgcagcgtggcgcgcagctgcgtgtcggcataggcctgggtgcggccgttgtcgagcagcaccaggtggacctcgcgcgggccgtcgcgctcgccggcgcggcgcggcccggagatcaggttgaagtaggtggtgatggcctgcccggtggccgagcgcgtcagcagcgtggacagcggcacgatatgctccagccgggccacgaccttctccatgcccatgatggcgatatgcacgtcgggcacggtggtggaaagccggccgttgccttcgttctccaccagccacagcgtgccggtgtccgcggctgcgaagttcacgccggacaagccgatatccgcttcgacaaaggcctggcgcagcgcacggcggccggtctggatcagcgcgtcgacatcctcggtatagggcgtgtcggggatatgcgcctggaacagctgcgcgatatcgcccttggtcttgtggatcgccggcatcacgatatgcgagggcttttcgccggccagctggacgatgtactcgcccatgtccgactcgatgcagtccacgccgcgctcggccaggtaatggttcagctcgatctcctcgctggccatcgacttgcccttgatcacgcgctgcgcctgcttcgatgccgcgatgcggtggatgatcgcgttggcttcgtcggcgttctcggcccagtgcacctgcacgccggcggcggtgagctttgcctccagctgcaccagcaggtccggcaggttggccagcgcgtgctggcgcaccgcctcgcccaggtcgcgcaagcgttccagctcatccgcgtcggggaactgcgccaggcgcttgccctgcaggaagtccatcgcgccgcggaaactctggcgcagcttgggatcgtccagcgcttcgcgggcgcgtgccttgaagtcctgcggcggaacaaaattcagtgcgtgctggctcattgcccggcctccgcagtgtcggtctcgatcacgacccacagccggcgcggaccatgcgcgccgtaggccagcgtctgctggatgtcggaggtcttggaggggccggagatcagcaccaggttggccggcatgccgtcggaccagcgctcggtgcgcacggccatatgcaggtcggcgtgcagcgtcgaggcgcgcaccagcgcgacatgcagcggcggcaccagcgacaccgtgcgtggcgagcccgcatcgggcgcgaccaccagcgtgccggtggcggcaatgccggagcgcgccacggtgaagccggcatcgatggtgtcgaacagctccgccttccacgcttcgatcgggcggtcgtagccgatggcttcgatgtgggccggcaaggcggccgccagtgcggcaccggcctggctggcgggatcaagcagcaggcgcttcaccccggcattggccagctcagtggccagcaatgccggccaggccgcttcgctggcgcaccagacttcggcatgcagcccttgcagtgccgcctgcatcgcgccggccagttcgccaacggctggcgtgccatggcggcgtgcctcgaaatggccgtcgatgcggcggtcgagttccgcggtgcctggggacggtgcaggcgcggcggcgcgcagccggccgagcatgcgttcgcgggcgccgggcgtgctcatgcggcacctccgctacggcgccacaggaaggtggccaggtgctccacctgcagcggggcgcggtcatgcgtcgcggtatggccgatattgagcaggcagccgcagtcggccgagaccagccggtcgcagccggtggcgcaggccgaggccaccttgtcgcgcaccatggcgccggagatatcgggatgcttgagcgagaaggtgccgccgaagccgcagcattctgattcgcgttcatgctccacgcgggtcacgcccggcagcgcgtcgaccagggccacgccgtgctggcgcgtacccatttctcgacgggcgccgcacgaggtatgcagcacgatgcgctcctgcgcctggcccgccgctgcggcatcgccaaagtccaccttcagcacatgcagcaggaattcgcccagttcatagatgcgtccggccagttccagtgccttggggccggccaccggatcgtcggcaaagagctgcggccagtggtggcgcatcatgcccgcgcatgagcccgatggcacgatcaccggccagggctggctgaacaggtcgagttgggcgcgcgccaccgcacgggccgcgtcggggttgccgctgctgtaggcgggctggccgcagcaactctggccgcgcgggaagtgcacggtgagcccttcgcgttcaagcaaccgcacggcgtcgaggccggcctgcggcacgaacatgtcgaccaggcaggtggcaaacaggtaggcctgcgtgggggcagggccggtggggtactgacgatccttcatgtctcgctccggacgtgctggggtcgcacgtttcggcgcataattcccgcttccgcgcggcggtacaaattggttggaccaatctgcccgacgacgcgcgcaagctcaggagcgaggacacacggcatgacggcagcggcagcaaggcacgggcgcacccgcggacgcgtggagtcggtcatgcgccggatcgagaccgcgctgctcgacggcacctggccgcccggcacgcggctgccggccgagcgggtgctggccgggcaatacgaggtggcgcgcaacaccgtgcgcgaggcgatccagcgcctggccgcgcgcggcctgctgcagagccggcgcggtgccggggtctacgccaccgaccagctgcgcgccggcattgcctcgccctggggccagctggtggccgaccaccccgcgctgcgcgacgacatcctggagttccgccgcgtgctggagggcgcgaccgcgtattttgcggcgctgcgcgcggatgccgctgacgtgaagcggatccgcgccctgatggccgagctggaacgcgcgcgcgccgccgacgacaagcaggcagaggccgatgccgatgcgcagctgcacgacgccattgcccaggcctcgcacaacaccatgttcctgcacctgcataccagcgtgatcggcatgctgcgcgagcacatcaccatcaatggcaccggcctgcgcgaacaggacgacggcgcgtcagacctgttgctgctgcagcatcgcacgctgtgcgatgcgatttgcgcgcgccgcccggaagaggcgcgcaccgccatgcagacccatatcgacttcgtgcgcagccgggtggagcaggacggcgcctgagcaggcattggtcctaccaccgccgcggcgagccggctgcggcactcagatcagtccggcgccggccagctcccgcttcaggtaggcatagaagataggtccggcgatcacgcccgggatgccgaacagcgtttccatcagcagcatcaccatcagcagttcccacgccgcggcctggatgcgcgcaccgatgatgcgcgcgttcaggaagtactccagcttgtggatcaccaccaggaacaccagcgacgccaccgcgatcggcagcgacaccgacagcgaggccaccacgatggccgtattggaaatcaggttgcccagcaccggcagcagcccggcaacgaaggtgatcaccaccagcgtcttggtcagcggcaggtgcacaccaaagagcggcagcatcagcagcaggtagatcgccgtcagcacggtgttgatggtggagatctggatctgcgcgaagatgaactgcgagaacgcctgctgcagcgtgcgtgcgcgcgccaccagcgccgcggccagcggccggcgattgggccgaaccaccgcgcggtacagcgccaccatcgcgccgatcaccagcccgatcaggatatgcaccagcgtgcgcagcacctcggcgcccagcttctgcgccatcgcggcatgctcgcgcagcgtctcgatcagcgtgttggccagctcgtccacgcccttgggcagcgcatcgctaagccacggcggcatctgcccgcgcgagcggtcgatgatgtcggccacatggttgagcagcccgtccagggtattgccttcgccactgacaaagcgcaccagcagccagcccgccagcgtcagccccagcaggatcagcgccgacaggatggccacggccagggcgtcgtggcgctggtgcaggcgctgcaggcgcggcgccagcacgtccaccagcgagtacagcagcaggccggacagcaatgccgccaccaggttggcgtggagcacggtccacagcgccagggcggtcagcaggtaggcgacggtgccgacgctgtaccacgcggccggcagcaggcgcggggtggcggtcgggtctgggtctttcatcggggtctccggcatgcaatttgctcaaaatttattctggattctcgccgatccagatgttgttcctgagtcaggccgtgtgcgctgaggcgatgttggcatcacggcacacgcaaaggctgtctatattagggggaatcgcgcccggcaaggcgcccggcgcaccgctgtcatcgttttctccagagtccaggaacggaacgcatggcctacacccacaccatcggtacccaccgccacgtctttgccgacctgcgcacgctactggcccgggccagcccggcgcgttccggcgacgcgctggcgggcgttgccgcggccagcgagcaggagcggatggccgcgcggctggcgctggccgaggtgccgctcaagcagttcctgaccgaggcgctggtgccgtacgaggacgacgaggtcacgcgcctgatcctggaccggcacgatggcgcggcctttgccgccatcggcgccactaccgtgggcgacctgcgcaactggctgctgctgcatgaaaccgacagcgccatgctggcgcgggtggcgccgggcatcaccccggagatggccgccgcggtcagcaagctgatgcgcaaccaggacctggtggcggtggcgcgcaagtgccaggtggtgacgcgctttcgcagcacggtggggctgccgggccggctctcggtgcggctgcagcccaaccacccgaccgacgatcccaagggcattgccgcgtcgatcatcgacgggctgctctatggctgcggcgatgccaccatcggcgtcaacccggcttcggacaacctgggcgccattgtctcgctgctgcgcatgatcgacgagctgcgcagccgcttcgacatccccacgcaatcctgcgtgctgacccacgtcaccaataccctgcgcgcgatcgggcagggcgcgccggtggatctggtgttccagtcggtggccggcagcgagcgcgccaatgcggccttcggcatcagcctggcgctgctggccgaggcgcacgacgccgcgcaggcgctggcgcgcggcaccgttggcgacaacctgatgtacttcgagaccgggcagggcagcgcgctgtcggccaatgcgcaccacggcgtcgaccagcagaccatggaggcgcgcgcctacgcggtggcgcgcgcgttcgcgccgctgctggtcaatacggtggtgggctttatcggtcccgaatacctgtacgacggcaagcagatcatccgcgccggtctggaagaccacttctgcggcaagctgatgggggtgccgatgggctgcgacgtctgctacaccaaccatgccgaggccgaccaggacgacatggacacgctgctgacgctgttcggcgtggccggaatcaatttcatcatgggcgtgcccggcgccgacgacatcatgctcaactaccagagcacttcgttccacgatgcgctgtacctgcgcgaggtgctggggctgcgccccgcgccggagttcgaggcctggctgcagcgcatgggcattgccgatgccagcggcaggctgctcgagcccgccgcgcgccagccgctgctgcagatggcccacagcctgtaaggtacagccgatgacggccagacgcccgcctcccgccgatcctgccaacaccgatgccgatccctggcaacgcctgcgccagttcacgcgcgcgcgtgtagcgctgggccgtaccggccacagccagaccaccgatgcggtgctggccttcgggctggcccatgcgcaggcgcgcgatgcggtgcacctgccgctggacgtgggcgcggtcaccgcggcgctggatgcggcgggggtgccgaaccttgccgtgcacagcgccgcgccggaccgcgcgcactacctgcggcgcccagacctgggccggcgcctggacgatgccagccgcgcgcggctggccgcggcacgccctggcgaggcgcccgatgtggtgttcgtggttgccgacggtctgtccgcgctggccacgcagacgcacgcgctgccgttgctcgatgccacccgcccgcgcctgccgctgacatggcgcatcggcccggtggtggtggccgagcagtcgcgcgtggcgttgggcgacgagatcggcgagctgctgggcgcgcgccaggtggtgatgctgatcggcgaacggccgggcctgagttcgcccgacagccttggcatctacctgacccatgcgccgcgcacgggccgcaccgatgccgagcgcaactgcatctccaacgtgcgccccgaaggcctgccgtatgcgcaggccgccgaccggctggccttcctgctgcgcggcgcggcggctttgggccgctcgggcgtggacctgaaggacgacagcgtgccggcgttgcctgaaggctgaagcgtctccctcgctcacccgcccgccagcagcaaaacggccgccacgcgggttagcaacccgcgtggcggccgtccagtggccaataaaaggcgccgcttacatcatgcggcgcgaaaactgcccatgcccagcgtccgacatcaacttcgagaactgctcgccgctcatgtgcaccagttcctggtggtcgccgccttcgaaatacacgtcgggctgcgccatcaggctgtcgtccacataggtctgcatgccgtaggccatcgccaccggcgggatcgcgccgaggtcgcaatccttgaagatctcgcggatctcgtcctcatgcgccagcaccaggttgcgcccggtctgttcgcagatggcggccatgtgcagatggtggcttgaaggaatcacggcagccacatagccgcggtcatcctccagcaacagcgtcttggccagccggtccccgggaacatgcgctgcctcggcagtggccatgctgctgagggtataagggtggcggatgatgtcgtactgggtgttcttgctgctcaggcagcttgcaagcgtgctagccagggccatggtagctcctcaggtgcggatgcgccgacggttatccttgtgctcctactatagtccgtggcgaccgctgccggaggcaccgctagcggtgcagccgcggccacactgcctgcagttcggtcttcaggaagttcagcaggtagcgcgtcgccagcgtctggtagcggttgggcatggtcagcatgtagagcttgctgccgaacacgctgatgcggtagtcgcacagcagcggcaccagggcgccgctgtccagttccgcgccgatcgcatagatcgggaagatgccgatgcccaggcccgccagcaccgcctctttcaggaaggcaaagttctcggaggtgagcgttggctccagcaccacctgctcacggatctcaccgccgtcgccgccgccactgtgccggatgcccgttgccttgagcttctgcccctcgggcgacgcgcacacgaacgcatgcccctgcagctcggacagcgcttgcggcgccaggtggccggccaggtaggctggcgacgcgcacacgatccagtcgacttcgccgatctcggtggcgaccactgaatccggcggggtggagatgatgcgcagggccacttcgacgtcctcggacaccaggttgtgcacacggttgtcgaagaccacgtcgagcgtgatgtcgggatagcgctgcttgaacagcaccagcagcggcgacagcagtgaatggcccaggccagtaggcaccgagagccgcacatggcccttcaggctcttgcccatattgctgatcagcgcattggcggcggctacctcgcccaggatgttgcggccgtgctcgtacaagccggcaccgaccggagtcggctcgacatggcgcgtggtccggcgcagcagctgcacgcccagctcttcttcgagcgccttgagccggtagctgacattggcgcgcgtcatcttgagcttgcgcgcggccgcgctcaggttgcccgcatcgacgatgtcgacgaacaggcgcagggcgttcaggtccatggggtgatcaatgaaagaggggggcgattacggcccccgtatattgccatgctcttggcggcgtcccgcggcatagcaccgcggggtgcgcatcaatgctcgtgatgcaggtatggtttgcgcgcgattgtccatgtggctggacactgaatctggctgcggcccgtctggcgcccaaacgcaacagggtattgcgtgcgctgcggcttgcactgtgcgcggggatgggcaatgatgcgagccggaccttcaactggcctactgcgccccccgtttgccatgcaccgctcgttgcgtcgatggctgtgcctgcctttgctctttgccggcgccagcgcccctgcccaggacctggtcgaatgcaagcggatcgagcacgaccagctgatcaccgcctcgcaggaaacgctgctgttcctgcgctgccgtgcgcgccaggtcgcgtatgaagcgccgcgcctgaagggtgtttcgcagcgcgtaaaggacgacctggtgttcgcctgcctggaccaggccgacgccgtagagcaccagctgcgcgtgcgccacggctactcgcgcgacacgctggcgcgccagcgctgcgaactatccttgccggcgcccgggggctgacttctgccccggcgggcaacggctcaggcaaagcccccgttcacccgcaccacctgcgcattgatccacgccccatccggcccggccaggaacgacactgccgcggcaatgtcctcgggcgtgcccagccgctccagcggcgccactttggacagctgcgccacctgctcttccgatttgccatcgaggaacagctcggtcgcgaccggccccggcgccaccgcgttggcggtgatgccgcgcccgcgcagctcgttggccaggacccgcaccagcccttccacgcctgccttggccgcgatatagggaccgtaaccgggcaaggaacgcgcgatcacgctggtcgacagcgcgatgatgcgtccgccctggcccagccgtgcggcggcctcgcccagcaccaggaaagcgccgcgcaggttggtggcgatggtctggtcgaaggcgtctaggctggcgggcgcgaccgacgccatctgcatgatgccggcgctgttgacgaccacgtcgagccggccgaaggcctgctgcgcggtgtcgaacaggcgtgccacgtctggcgcctgcgccacatcgccctggatggcgatggcattgctgccggcctcgcgcgccgccgccaccgtctcttcggcccgggcggcgctgccggcgtagccaatggccacgtcgaagccgtcggcggccagccgcagtgcgatggcgcggccgatgccgcgggaggcgccggtgacgagcgcggcgcggcgggagatagctggggtggaggtcatggcagtttccttgggagcaaagggaagatgacctcatgttggatgttggctgtctttggataaatgtgtggaaatcaaattgattagacggaatttatcaacaatatcgggcgtgccgcataggccgcaccgcatgcacatcccggaaatcccgcgctggcgttgcaggctccgcctgcgccgcccccaagcatgcgttaagattcttccagccgtctttggcgctgcatcctgccgctgtatcccgcgtttcgccatgagcaacctgaaccagcaatccatcctctccgtccatcactggaccgacacccttttcagctttacctgcacgcgcgaccctggttttcgctttgaaaatggccagttcgccatggtcgggctggaggtgaacggtcgcccgctgctgcgcgcctacagcattgccagtgccaactatgaggaaacgctggaattcttcagcatcaaggtgcccgacggcccgctgacctcgcgcctgcagcacctgcgcgagggcgaccagatcttcgtcggcaagaagccgaccggcacgctgctggtggacaacctgctgcccggcaagacgctgtggctgctggccaccggcaccggcctggcgccgttcctgtcgatcatccgcgatccggaggtctacgagcgctacgacaaggtcgtgctgacccacacctgccgcttcgttgaagaactggcctaccgcgagctgatccaggaacacctgccgcagcacgagcacctgggtgatctggtgcgcgaaaagctggtgtacttcccgaccgtgacgcgcgaagagttcgacaaccgcggccgcatcaccgacctgattgcctcgggcgagctgttcgagcgcctgggcgtggagccgttctcgctggagaacgaccgcatcatgctgtgcggcagccctgacatgctcaaggacgtccgcgccatcctggaagagcgcggctttgccgaaggcaatatgagccatcccggccatttcgtgctggaaaaggccttcgtcggctaaggccggcctgccccggcgcggatcggttccgtgccggggcgcacccctgctgtacccccgctatacctcccgctacacctcccgcgtcatccccttcaggtcgatccactcggcaaactgcgcctcagtgacatgcccggacgcgatcgccgcctcgcgcagcgacaggttgcgcttgaccgccagcttggcgatctccgcggccttgtcgtagccgatatgcggattgagcgcggtcaccggcatcagcgaacgctccagcagttcggcgatgcgttcgcggtcggcctcgacgccttcgaccatatgctcggcaaagctcgacgcggcccctgccagcaggctcaccgactgcagcaggctgtagatgatcactggcttgtaggcgttcagctcaagcgtgcccagcccgttggccagcgtcaccgtggtgtggttgccgatcacgcggcagcacaccatcgccagtgcctcggcctgggtcgggttgaccttgcccggcatgatcgatgagcctggctcgttggccggcagcaccagctcggcaaagccggcgcgcgggcctgagcccagcagcatgaagtcgcgcgcgatcttcaggaacgacgaggccgtggtgctgagcgcgccggacaggtcggccagcgcatcgtgcgaggcctgcagcgcatagcggttgggcgcgggctcgaacggcaggccggtgtagtcggccagcgcgcgcgcgaaggccgcggcgaagccgtgcggggcgttcaggccggtgcccaccgcggtgccgccctgtgccaccggcatcgcgcgcagcatggcctgctgcaggcgcgactgcgcatcggccacctgcgtcatgtagcccgagaactcctgccccagcgtcagcggcaccgcatcctgcaggtgggtgcggccgaccttgacgatatcggcaaaggcttccaccttgcgcgcgaaggtctgctgcagctgctccagcgccggcagcagttgctgctgaatcgcgcgcgtggcggcgatatgcatcgcggtggggaagctgtcgttggaggactggctggcgttgacgtggtcgttgggatgcaccggcgtcttgctgccgaccttgccgcccagcaactgaatcgcgcggttcgcgatgacctcgttcaggttcatgttggtctgcgtgccggatccggtctgccagaccgacagcgggaactcgtcgggccagcggccttcgatgacttcggtcgcggcctgttcgatcgcgtgtgccagttcgggcttgagcacgccaagctcgccattggcgcgcgccgcgcacagcttcaggacggcaaaggcctcgatcagcgccggcggcattttctcgttgccgatgcggaagttctggcgcgagcgctcggtctgcgcgccccacaggtggtcggcgggcacgggcacgtcgcccaggctgtctttctcgatgcgggtggcggcggtggacgggtcagacatgggcagactcctatgcaaggcagcggacggttggaccgggtggcttggtgcagtccattagaataccgcttcaccgcggccggcgcccaggcgcccgccgccttgccttgcccttagcgacatccctcggccgcatgctcatcgcccagctcaagtccttcttcatggtggcccgcatcggcagcgtcacgcaggccgccaagcgcctgggcctgtcgcagcccaccatcaccgcgcagatccgcgcgctggaagaagcctacggggtcgagctgttccaccgcggcgggcgccgcctggcgctgtcagacgcggggctggcattgctgccgcgcgtcgaggcgctggtgcagcaggaaaccgagatcgacttcttcctgcgccattcgggcgacctgcgcaccggcagcctgcgcgtgggcgcgaccgcgccctactatgtgctggagctgatccgcggcttcagcgagcgctttcccgccatcgatgtcagcgtggtgacgggcaattcgcaggaggtgctggaagcgctgcaggaataccgcgtcgatatcgccacctcgtcgcagcgggtggacgatgcgcgcctgtcgcgcgtgctgctgggcgtggacccgctgatgctggtggtgcatcgcacccatgcgctggccgggcacaccgaagtggccgtcagtgcgctggcgggctgccgcctgctgatgcgcgagctcgggtcgaccacgcgcatcgcaaccgaagacatgctggcgcaggcgcgcgtgagccccgccgcgcagatggagatcggcagccgggagtcgatccgcgaggcggtgatccgcaacctgggcgtatcggtgatcgcccggcacgaggtgccgagccatccggacctgcgcgtgctgggcttcaccgatgcctcgccctgcctgcacgagtatctctactgcctgcgcgagcggcgcggcgccaggctgatcgatgccttcgtcgcactggccgagccgccgcaggggcggcaggaatcgggcgcggaccgctaagccgtcatcttcaggcactgctccatgcaggctgcgcaggcgcgggcgcattcctggcagtgctcgttgtcatggtgctcgcattcctccttgcaccacttgcagacttcggcgcagtcttcgcacaccagcgtcgcgaactcgctgttgcgcagcatataggacgcggccagctgggcgatgccggcgcaatccatgtccagcgcgatgcagcgcgccatcttgcgcacgtcctgttcttccaggcaggccgcggcgcacttgagtgcggcagcggatgcggcattgcaggcggcaatgcagtcggcgtagcgggcggcgttttcctgcacggtgggtcggatcatggaacgtcctccttcgggggtaggtggatggggaccagcatgcccacggtggcggaagcggcgcatccgcacgcgcacggggcatcgttatccacaatagcaggcgctgccggttcctgtcggcccggtatttgctgcgcgccgctggttacaatgccaactgagcgcagcagatcggcgacggcgcgcacgcagcgccgccgtcacctgcgaccatggccgggcaccaccggcccgcattgcgcatctaacaggcacgggtccggccgcactggcggggccgatgcaaacacacaccggcagcacggggaaggaaggcacatcatgggcgaggcaaaacggcggggaacccccgaggagcgtgcggcacaggcacgcgcaaagatcgaggccttgcgccccgcccagttggtctgcgggcactgcaagaccgcgttcgcgcaattcgacgcgctcgacgtgccgggcctgcccggcatcgatgccgtgttcggcggcgaatgccccggctgcggcaacgacgtggtggtgttcaagggcgcgcccgatgcggtggcccaggccatgatcgcgtgggagaagatgctgggcgccgatgcgcagctgggctaccagtccagcgatggccgccacgtgccgttcgagcccgagggggccggcggcgcggcgtcggacaagcccggcggcactatccactgagcccccggccggggccgcctactgcgggctgagctcgcccgccagttccggcgggccgatctcatagcgcccgcggcccgcgcccttggcgcggtatagcagcacgtccgccagccgcatcagttcgcggtcctgcgccgggccgccgtggtagagcgccacgccgatgctgacgtcaacgtcggcggatacgccctcgaagtcgaagggctcgtccatcgcctgcaggatggcctgcgccacgcggcgtgccgcggcgggctgggtcatgtcttcgagcaccaccgcgaactcgtcgccacccagcctggcgacggtgtcgcgctcgcgcacgcagcggcgcacgcgctgggcaaaggtctgcagcagctggtcgccggcggcgtggccgtggatatcgttgacggccttgaagcggtccatgtccaggtacagcagggccatcagcgtgccatgctcgcggctgcgcaccatcgccgcatgcagctggccctcgaaggcgctgcggttcatcagctgtgtcaggtggtcggtgcgcgacatgcgcgccaggcgctgcgtctccagcttgcgctgcgtgatgtcttgcacgtggatatgcacgcccaccacctcgctgccgtcggcgctccattccgggcgcaggctgctctccatgcagtggtattcggggtcgctgtcttcggtttcgaaggtcaccgcagtgcccgccagcgcgcgctgcatgaagggctgcacgcgcgcgtagcgggcctcgcccaggatttcgcgcacgtgcctgccgcgcagttcctccggcttcaggccgaagacacgttcgtaggcctggttgttgaacacatagcgctcatcggtgtcgataaaggccagcagcgacggcagcgtgtcggtcaccgcgcgcaggcgccgttcgctgcggtccagcgcctggcggcgctcgcgcacgtcgcgcatcagcttgatgaaggcgcgcgtcaggtcgccgatctcgtcgcgctgctgccgtgttggcagccgctcgaacgcggacaggtcgttggcgctggcctgtaccaccttgtgcaggcgcgccagcggcgccagctggcgccgcaccgccagccagatcagcagggctaccgccgccatggccaccccggccatgcccaggaagcgctgctgcatctggtgcagcggtgcgtaggcctcgcgcgcgggcagcagcgccaccagttcccagccggtgctcgacatcaggtagcgcgcgatcaccggccgcgccggcgtgaggaattccagcggcgcggggctgtcatcctcgccgcaggtatcggccacggccagcgccggctggcgcgcctgcgcgggatcgggatggcggatatagaccggcttggggccggccgataccaggcagtagtagccggtggtgccaaggcggttgtgcaggatctcgaccaggaagttggcgctggacaggtccagccagccgcccaccaggccgacgaaggtccggttcggcgtcagcaccggcaccgccaccatcacccccatctggccgttggtgcgcgagcggatgggcggcgacactacgggcgcgagcgagcgggcggcctcgcggaaatagctgcggtcgccaatgtccgccccggcgccgcggtgggtgacgatgttgccctgcatgtcggcgaccagcagcgcgttgaacgcggccggcaccgggatcgctgcggacagcgtatccagtgcccgctcgcgcgccgcggcggcttgcgcgccgtgtgcctgcaccagcaggccgctgagttgcgcagcctggtgcgacagcagcacaatgcggtcgttcatggcggtgtcgagctggttggcggtcagcttgacgacggaatcctgctggacctgcagcgcatcgtgcaggtcgcggtgggcatcgtacagggcggtcagtacgatgccggtgccgaacaccgcggccagcacggtggtgatgatcgcaatgcgcgctttcagcgtgggtgtgtagacgggcatgtagggcgcagttggagtgccagtggcgcagaccgcgtacttgggggcatctccggtgcaaccctaccataccccgccatggggggcatgcggtctttcccccgaacgggtccatccccggcgggggtgtgcgcgctgcccgtgccacggtatagtcccccgttaatgcgaaggcacgtccacgcagacggcatgcccctgctgcatgccggaaccgatcgaccatgagactgacttcgctttcccctgccttgttgtcattgctggtcgcggccggcggcgcgctgttgacggcaggggcatggctgcaggcggagcggctcgagcgccgcgaggcgcagcagcatttcgacgcgctgctgggacaggccggcagcgcgctgcgcgagcgcatgctggagaacgaacgcctgctgcgcggcgtggccgccgtgctgaccgccaaccccgacacctcgcgcacgcagtggcgcgactatctctatactgcccagctcgacgacctgcccgccggcacccagtcgatcggctacgcgccgctcacgccgttgcagcgggtgccgcggctggtgcaggccgcccgtgccgacggccttgccgactacgacattcatcccggcggcaagcgcgacctgtacgcaccgatcctctatatcgaaccgctggacgggcgcaacacgcgcgccgccggctttgacatgctgtccgagccggcgcgccgggcggcgctggaagccgcccgcgacagcggcgaaccgcggctcacgcccggcctggcactggtccgcgaaaccgaggcggcgcagcaccagcacggcgcgctggtattcctgccggtctacgccggcgaggcgccggtcagcacggtggcgcagcggcgccaggcggtgcttggctatgtctacgtgtcgctgcgcctgggcgacctgatgcgcgcggtcggtgccccggcggcggcggaactggagctctcgctgcacgagggctccccggccgcgcccgggccgatgctgtccggcgggccgaccgagggcgagcgccgcgaggacggcagtgcggcgctgctgcacggcgagcgccagttccagtatggcggtgtcacctggacgctgcgcgccgccacgcgccccgccttcgaagccgcgcatggcccgcggcaggcgtacctggcgctggccgcgggcacgctggccacgctgctgctggcgtggctcacccatgcgctggcacgccagggccgtgccgcatgccagcgcgaagcgcaggccgtgcatgcctgggaagatgacagcgcgatgctgcaggcgtgcctggcgcagtcggccgacggctttatcctgatcgatgcgcagggcgtggtggtgcgcgcgagcgagcgggcgggacaactgttcggcgctgatccgcagcggctggccggacgcagcctggacaccctggtccccggcgccaccggcgttgtccccggcgatgctgcgccggggtccgaagtccaccgtgaactggcgggcgtgcgcgcagacggcagccgcttcacgctgcgcgccagcgccgcgcgcctgcctgcggccgacggcggcgcggcgcactggctgtgggcggtcacggacctggaaccggaacggcgcgcccagcaggccgccgcggtgcaggccgcgcgctatgccgggctgctcgaccatgccgccttctgcgtgatcacgttcgatgaggacgggctgatcaccggcatcaacgcggctggccagcgcatgctctggtacaacgccgcggaactggtcggccacatgcacatgaccggcctgcatgttgccgacgaactggccgaccatgcccgcatgctcagtggcgaactgggcgagccggtgccgccggggctgcccgccctggtggccaaggcacggcttgccctgaccgacgagcgcgaatggacctgggtgcgcaagggcggctcgcgcatgccggtgcagctggcggtgttcgccctgccggcgcccatcgaggctccagccgctgacgcagcgccagctggtcccgccgatggtgccgatcgtgccgatgtgccccggtccgcgccgtcgcctggctaccaggccatcggctacgacctgaccgagcgcctccgcgtcgacgagtacatccgacacctcgcgctgcatgacccgctgaccggcctgcccaaccgcgccgagctgagcgagcgcgcgcaggcgctgctgctgtacgcgcgcagccacggcgagcgcgtggcgctgctgctgcttgacctggaccatttcaagcacatcaacgactcgctcggccaccccgtcggcgacgacgtgctgcgcaccatggccgaccgcctcaagggcgcggtacgacagggcgacctggtggcgcgcatgggcggcgatgaattcggcgtggtgctgggcggcctgcgccacgacagcgaagccgagctgattgccgccaagatccaggcgcgcgtcaatgaagaactgcaggccggcggccagcgcctgcgcgtgacgccatcgatcggcatggcgatctacccggacgatggcgatagcctgaccgagctgctcaaggctgccgattcggccgtgtacgcggccaagcacgacgggcgcgcacagttgtgccgctttgccagcgccatggccgaggcctcgctggcgcgcttcaccatcgaagggctgctgcggcgcgcgctcgccggcgatgagttccggctgcgctaccagccgatcgtcgatgccgcgaccctggctataaccggcgtcgaggcgctgattacctggaacaccccggaacgcggcgccatgcagccggccgagttcatccccatcgccgagcagagcggcctggtggcgccgctgggcgaatggaccctggccaccgcctgccgcgaaatccaggccctgcgccaggcgctgggcagcgagatcgaggtcgcggtcaatatctcgccgctgcagctgcgccaggccaacttccccgataccgtggcgcactgcctgcagcaggccggcctgccgccgcaggggctggtgatcgaagtcaccgaaggcatcctggtcgacggcggcgagaccaccatcgagaccttccgccggctgcgcgagctgggcgtggggctgtcgatcgacgatttcggcaccggctactccgggctcaattacctgacccggctgccgatcagccggctcaagatcgacaagtcctttgtcgacgacgtggccacgcccggccacgaccaggcggtggcagcggcgatcatcgcgctgggccaccagctgcacctcaaggtgattgccgaaggggtggagacggcggcgcagttcgagttcctgcgggcgcaggggtgcgacgggctgcaggggttcctgttcagccaggcggtgccgcagcaggtgctgcgggagatcctggaacaggggattcgggtgccgacccccacgtctgcgggcgccactgcgctgcgcgagccataatcgtccaggggcaccattcataacttgccggcgtgcccgcgccgctgccccatcccaaatcccccgatacctccatcgaaatactttgccgatctgccacacggctggcatctgcgctgcctatgctggcgaccgattcaattgagattgcggagattcggtgatgcaggcaggcaagtccggggagggccgggcgttcctggcagtggagcaggtcagcaagcgctttggcagcttcgtggcgctggacggcgtgtcgatgtcggtcgggcagggcgagctgctgtgcctgctgggcccgtccgggtgcggcaagaccacgctgctgcgcatcatcgcgggacttgagcgcgaggacgcaggacgcatccatgccggcgcgcgtgaactgaccgggttgccgccgcaggcacgcgactacggcatcctgttccagtcctatgcgctgtttcccaacctgaccgtggcgcagaacgtggcctatggactgcacgggcgcggcatgggacgcacgcaccgcgacgcgcgcgtggccgagatgctcgacctggtcggcctggccggcagcgagcgcaagttcccgggccagctctccggtggccagcagcagcgcgtggcgatggcccgcgcgctggcgccggcgccttcgctgctgctgcttgatgagccgatgtcggcactcgacgcccgcgtgcgcgaacacctgcggctggagctgcgccagctgcagcgcaggctgaatatcaccaccgtgatggtcacccacgaccaggaagaggccatgaccatggccgaccgcattgccgtgatggacggcgggcgcatcgtgcaggccggcactcccgccgaaatctatgagcagccggcgtcggcctttgtcgccggttttgtcgggcaggccaactggctgccggggcgcagcgtgcaggccgggcgcttcaccgtcggcgagggcagccaggccgtcgatttcctggtcgactcgccgcagccggcggcatccgccggccggctgtgctgccgcccggaagcggtgcggctggacccggatcctgccgagcccaaccggctgctggcgcgcgtggtcgaccagacctacctcggcaaccgctaccggctggcgctggatgcggatcgcctgccggggctgaccctgtttgccgacgtggcgcgcgaggcgcggcaccggctgcccgacgcgggcggccacaagttctggattgcgctgcccgcgcaggcgttgcgggtgtttgcatgatgcgcgcggtcactgccgtcctgcccgaggctacgcaggcagcatcgccgcgcggcaccggcctggcctcccggctggcgcacggtgccccgaccgcgatgaagtggctctggctggccgggctggccgtcggcctgctgctgccgttgctggcgctgttccgccaggcgtggttcgatgcggcggggcaatgggcgctgggcgcgcgcatggcggcgctggtgaccagctccaacttcctgccgatgctcggccgcagcgtggcggtgtcgctggcggtggtggcgctggtggtgccgctggcatttggctttgcctatgcgctgcagcgttcctgcatcgcactgcggccgctgtggcgcggcattgcgctgctgccgctgtttgcgccgtcgctgctgccggcgatcgcgctggtctacctgttcggcaaccagggcatctttcgcggcgccttcgggcaaggcggcatctatggcttctggggcatcgtgctgggcgaggccttctacaccttcccgcatgcgctgatggtgctggtggcgacgctgtcgctggccgatgcgcgcctctatgaggcggcgcgcgcgatgggcgccagcccgtggcgtaccttctgcacggtcacgctgccgggcgcgcgccagggcctgttcgccgccgcctgcctggtgctgacgctggtgatcacggactttggcgtacccaaggtggtgggcggcggttatccggtgctggcgctggaagcgtacaaggcggtggtcgggcagcagcagttcgaccgcggcgcgctgatcggcatgctgctgctggcgcccgcgctgctgacctttgccgtggacatggcaatgcagcagcgccagcgcacacagatgggcagccgcgcgcaggtgtatgtgccggcgcccgagcgcggccgcgacggcgcgtgcctgctgctggtggcgctggtcagtgccgcgctgctggcagtgatcgccaccgcgctgggcgcgtcgctggtcaagctgtggccgtacaacctgggcctgacgctggcgcattacgacttcgacaatatggacggcggcggctggctggcctaccgcaacagcctgaagctgtcggcactgaccgcgctggcgggcacggcggcgatcttcctgggcgcctggctgacgctgcgcacgcgcggcccggcctggctgcacggcgtgctgcgcgcgggcttcctgttgccgatggcggtgccggggctggtgctgggcctgggctatgtgttcttcttcaacgcgcccggcaatccgctgcacgcgctgtacggcaccatggcgctgctggtgctgtgcaacgtggcgcactgctacaccaccggccatctgaccgcggccgcggcgctgcgccagctcgacaacgagttcgaggccgcggcgctgtcgctcggggtggcgccgctggtgacgtgctggcgcgtgaccgtgccggtgtgcctgccggcactgctcgatatcttccgctacctcttcgtgtcgtcgatgaccacggtctcggcggtgattttcctgtacagccccgacaccgtgctggcggcgatctcggtgctgaacatggacgatgccggcgacaccgcgcccgctgccgcgatgtcgacgctgatcctgctgacctcggtgctggcggccctgctgctgcacgcggtctcggccggctggctgcgccgcgcacaacgctggcgcgccggctgacctttgcccgattcgccgtacccctgcattccggaacactcaccgaacccaaggagaaaccatgtcccgcatcaccaaccttgtcgcggcgcttgccgccgcggccgccctgccgatgctggccggcaacgccagcgccgccaccgtgctgacggtctataccgcgctcgaagccgaccagatcgccgcctacaagtccgcgttcgagaaggtgcatcccgatatcgaaatcaagtgggtgcgcgattccaccggcatcgtcaccgccaagctgctggcggaaagggccgcgccgcgcgccgatgcggtgtggggcctggccggctccagcctggcgatcctggacaaggaaggcatgctcgacccgtatgcgccgaagaacctggccgcgatcgatgccaagtaccgcagcccggccaatccgccggcatgggtcggcatggacgtgtggggcgcggcgatctgcttcaacaccgtagaggcgcagaagcagggcctgcccaagccggcctcgtgggccgacctgaccaagccgatctacgcgggcaaggtggtgatgccgcacccggcctcgtcgggcacgggcttcctcgatgtcagcgcctggctgcagatgatgggcgagcagaagggctggcagtacatggatgccctgcacaagaacatcggcctgtacacgcactcgggctccaagccgtgcaagatggccgcgcagggcgagttcccgatcggcattgcgttcgagtaccgtgccatgaagtcgaagaaggaaggcgcgccgatcgatatcgtgctgccgagcgaaggcctgggctgggacatcgaggccaccgccatcgtcaagggcaccaggaacctggacgccgcgcgcaagctggctgacttctcggcctcgcgtgaagcgatggcgctgtatgagaagaactttgccgtgctggccgtgcccggcattgccaggcccgacgcgctgctgcccgccgactacgagaagcgcctgatcaagaacgacttccgctgggcgagcgacaaccgcgaccgcatcctggctgaatggagcaagcgctacgaagggaaggcggagaagaagtaaggcacacggcgcgcccggcggcgaggagatggcccgcagaaacgggtacgctccccgcgccgcggcggccgccctggccggatcaggcctgttgcggcacttcgtcggtggccggctggccggcgtgcaggcggcggtagagatcgtcgatgcgctggcggctggcctggagctcttcgcggccgcgctcggtcagcaggtagacccggccgatgccgtcgcgcagcacgctttccagatagccttccatttgcagggcacgcagcaacgggcgcactgagccgatatcgacctggaagccgtattccagcaacatgtcggcaagcatggccaccgtagccgggacttcaagcgcgaattgcaggacgtagacgcgggccagcaggcccaggaactgtcgtttcatgtggactggcaacgcggcagacgccgcgccggttgacgcaggcgccgtccggaactcggggtttgcaggccttgtgatgcctgtggcgcggcacctgtcatcctgctggactggcagtgctcatgcgccgggcaaggcgcattttacccgttcggacaaaaaagaagccgccaggagccctggcggcttgtcgggaatgcgtcggaggggtcaattaactctggcgcagaccagagtttaatttaatcgaaggcggcttgtcacgcgccggtaacagcccccctccagcgtggggtgatgatgaaagcttttgattggaaaagtgacgaattggcgtgagattgtgcagggagcggcgctcgaaaatgtcgtaaatcagtcaacatcacctaaattcctggcggaaagcggatcgccatcgtggcgacggcggggcacaggtccgaatccggcttgcggcatgcgctgcacaggcgtcaaatcgcggcaacctccaacccgcgcctcccggttcccctgatgaaacccgccgatctcgcccgcttgcttgccctggccgccatctggggcgccagtttcctgtttatccgcatcggcgtgccggcgctgggaccgatgccgaccgcgttcgcccgggtgctgatcggcgcgctcacgctggcggcatgcctgccgctgctgaagctgcgctgggatatgcagggcaaatggccggcggtgctggcgctgggtgtggtcaattccggtatcccgtttgtcatgtacgccatcgccgcgctgtggctgccggccggttattcggccgtgttcaatgccatgaccccgctgatgggcgtgctgatcggcgcgctggcgttttccgaacggctcacgcgcgccaaggccctgggcgtgctgctgggcgtggcgggcgtcgcggtgctgacccgcaccggaccggtggcgttctcgaccgacgtgctgctgggcgcgctggcctgcctggcggccaccgcctgctacggcctctccggctttctcgcgcggcgctggatcacgcggcgcggcgggctagacagccggctggtcgccgccggcagcatggtcggtgccaccgtgttcctgctgcccttctgcctcgccgcgctgtggcgccacaacacgctgcccgctgccggcgccggcgtgtgggcggccatgctggggctgggcgtgctgtgcacggcgctggcctacatcctgtattaccgactgattgccgagctgggcccggtgcgctcgctgagcgtcaccttcctgatcccgccgttcggcatcgtctggggcgcgctgttcctgggcgaggcactgtcgtgggcgcacgcggcgggtggcgtgctgatcggggtggcggtatggctggtgttgcggccggtgacgggggtggagcacggcgccagtccggcaggtggtgtagcggtcaaacgttgagcgcctctggataagaataaacttatattcattgccataacgcctttattgcttataaatttcttatattcgagtgatgaactcgatatattgggcaacgaaggccacgaggcaagtccgaaagctcgacaagccaatgcgcgccacgatccttgatgcgattgaggacttggggcatatgccgaactgccaacatgtcaaagcgctagccaaccatgcctatggctatcggctcggagtcggcaactaccgggtgctgtccgacggggacggagcgatatgaatcgtggaaatacaggaagtgagaaagcgggatgaacgcacctactaacatccagacgatcatcgggccggatggcaagccggcgtttgtcgtgattccctatggggactacctctcgcaatatgcgcgcgccagtgatctggttccgcatgcggtcgtgcgtcgcgtgctagccgatgacgtgccgcctctgcgcgcctggcgcgagcatcttggcctgacccaggcagacgtcgcagtgcgcctcggcatttcacagccagcctatgcgcagcaggagaacagcacccgcctgcgcaagacctcgcgtgagcgcattgccgccgcactcggcatcactgcagcgcaactcgatatctgagccaggacgcgaggtccctgactcaggcctgtgccgccgtgcccgccgccacgttgtactgctcgcgcaccatcatcaccacgcggcgtgcctggcgcaggtggcgcacggcgtcggcttcgctgcgttcggggaaatcgacttcggcgctccagttgcagccggtgtggtcgggccggtgcacgcagaccgcgcgcagctggcagtcgtggcagccgggctcctgccgcaggcacaggttgatcaggcgtttcagttcggacaggggcttgttcaggcgctccatggatggctccgtcaggtgcgcggcgagcttacgcccgggcgggcagctccggcgtgggctcggcctcggtggcgccggcacggcattgcgggcagacgccgtacagcaccagcatgtgctcgcgcaaaacaaaggcgttgtcggcggctacctggcgctggcgctgctcgatgctttcatcgcggaattcctccacgcggccgcaggcgacgcagatcaggtggtcatggtggccgccttcgttgagttcgaacacggcgtggtcggactcgaagctgtgtcgcagcaggatgtcggcctgcaccagctggttgagcacgcgatacaccgtggacagtcccgcgtcctcgtcctgcgtcagcaggatgcggtagacatcttcggcgctcaggtggcgccgggcgctggtgcggaacacttcaaggatccgcatgcgcggcgaggtggccttcaggccggcgcgcttgagatggatcgggtttgtgctctcgaatgacatggcggaaggcattggcatgcggctggcgccccgcgcgcagggcggcgcccggcctggcgccgcgcacgggcggcgtcgatggcttggcgggatttcaggctgaagcgccagggccggaccagtgctggcgcccccgtccctggcggcgcgccgtgcctgcacgacgcgcggaataaaaagatggcctggcttgtcaccggaagacgcgatcgggaaagcggggtctggttgctttcccgatcttccgaagactggctactgccaaacgctccgcgtgacggagcggtccccacaaaagtcggtgtcgaatgccgcagcggcggcatccggaaatcctgtcgttcctgccagcttcggttgctgccgcgtgccgcggcgcgccggacctggccggtctgcctgtcgggaggtgcgtcgtgcgtcaggcagtgatcggatagtaaatgggaatcgatctcattacaaggaaaattttacgggtgcctcattttttttgagggtggcccggtggcgcaatgtacgaccttgagggtaataatgcgaattgttatcattcgtaacgatttcttgccccggtcctgcgccatgtatcgactttcctcccgccatcgccgccccgtctctggcatgccgctgcagtcagccccagccgtgacggccggcctggcctgcggcgcagtactgcgcgtgccggcatgagccaggcccacgcttccggctggcgctatcgcgccggggtggcctcgcgcgcggtcgcggccattgctggcggctacgcgctggcggcgctggccaccgcggccctgtccgtgtggctgccgatggcgcggcccgatgccgtgacgacggccacgctgctgtccttcgcggtctatgccgcggcggtggtctgggtcttcgcggtgcgcagcgcgtggcgagcctgggccgggctggcgctgccggccgcgctgctgttggcgttgctggccgtgggacggggcggctgatgcgggcaggtttcaggcagtcgatggcatggctccatacctggagcggcctgctggtgtgctgggtgttgctgctgatgttctgcggcggcagcgccagctatttcaaggaagagatctcgctgtggatgcggcccgagctgcatcgcaccgcgcccgccgccgaggtgccggccacgcaggtggcgcagaacgcggtgcgctacctcagccggcaggcacccgatgccgcgcgctggttcatcacgctgcccgacgatcggcgccaggccgccaccgtgcggtgggtctacaagccgggccaggcgccgcgcgatgccgacggcaagccgcgccggttcgacagccgcttgctcgacccggccaccggcgcgccgctgcaggccgcgcgcgagacccgcggcggcgagttcctgtaccggctgcatttcgacctgcactacatgccggccaggtgggcgcgctggatcgccggcttctgcgccatgttcatgctggttgccatcgtcagcggcgtcatcacgcaccggcgcatctttgccgacttcttcacgttccggcgcggcaagggccagcgatcctggctcgatgcgcacaatgcgctggcggtgctggcgctgccattccacctgatgatcacctacacggggctggtcacgctgctgttcatgtatatgccctggggcatcgaggccgcctatcgcggcggcgagcgcgctttccaggccgaggcgatgctgcgtccgcggccagccagcgcagcgggcacgcccgccgcgctgacaagcgtggcagacatggtggcgcaggcggagcgccgctggcagggggccgcgccgcggcgcatcaccgtgaacctgccgggcgatgccaatgccaccgtggcgctgacccgtgccgagccgaccacgctggcacacgatgcgtccacgcttgaattctccggcaccagcggcgccatgctgcgcgcgtacgcggaagacaagtcagcggcagagctgacgcgcagcgtcatgaccggcctgcatatcgccggctttgcttcaccaggcctgcgcgcgctgttcttcctgtgcggccttgccggatccgctatggtggctaccggggcgatcctgtgggcggtacgcacgcgccagcagcaggccaaggcgctggctgcaggtgctcggcccggcgttggcctgcgcctggtcgaggcgctgaacatcggcgccatcgccggcctgccgattgcctttgccagctacttctgggccaaccgcctgttgccggtggaactggcgcagcggcctgaagcggagatccgctggttcttcatcgcctgggccgcctgcgcgctgctggcgctgctgcgtcccgcgcgtggcatgtggcgcgcgcagttgtgggtgggtgcggcgctgttcgggggcgtcccggtgctcaacgccctgaccaccggatcgcacctgggcgtgaccttgctgcaggggcgcgggccggcggcggtggctggcttcgacctggtgacgctgacgctcggtatcgcgctggcagccgcggcctggatggtcggacgcgggcagccggcaccgcggcgcacgtcacgccagccgcagaaggtggccgaagtggctgccgtcacacaggagcccgcatgagcatgaatatgctggctgccttcgcactgtcgctgtcaggattcgccgcactggcgctgtcgcttgaccgccaccatgccgatatccatggccgcggcagcatgccgtcgcggcgcgcggtggctgggctgcgcgcggcgggtgccggcgcgctcgcgctaacctggtcgctccacgttgctgccgacggcgggccgctgggaacggtgtcgtggcttggcacgctgaccgccagcgcgtttgccgtggcgctgggcctgtcctatgcgccacgcgcggtgcagcgcctgctgccgggcgtggcgggtatcggcctggccgcgctggccgcgcgctggctgcttgcaacctggatgtagcccctgcgcagccttacagcggcgggggcacccagtacggatcgcggccgtagtactcgtgcagcgacttgccccactggggatcggccatgctcggccagctgtccttgttgaagcccggtgcggatttgagccggtctgccgtcaccgcaatccggaagcatttctcgtcggtgtccatgaccagtgcattccatgggatggcgtgcagcgtgtcgccaatgccgaggaagccgccggtggtcagcaccgcgtaggcgatgcggccgtgcggcacatccagcatgatctcggaaatcttgccgacgtgttcgccatcggatgaataggccttggtgccgtcaaggctcgatgccgccatcacttcagggcccgggccttcgcccacgcctgaaccgatgatggccgcgccttcactggtgggaggttggttcggcatgctgtgctccttgtcgcaggacgttggaatgcatggcatgcgcaatgaccatgcctgcgccgtttgtggcgccgtacgcatggggctgaagttgccggctgccgccgtggtaattctttcgcgcggcatggaaaaaaaggcgcgtcagcatggcgccgcgtgccttcctgcagcggcacccggtggtgccgccgcgatcctcagaagtgatgccgcatgccgagcatgacgcccacgcgcgtggtcctgtccacgcccgcggcgggcgcgccggcccagtattcggtctcgcgtccgaccgcgccgccgcgcgcgtgcacggcatcggcttccaggtatacgctggtgcgcttggacaacgcatagtcggccaccacggcgatgctgtcggcgttgccgctgcccagcagcgccggcacgtcctggaactgcgtggtcacgttgccgccctgccagtagcggtagtaggcgcccgagacgtgcagcgccggcgtgagctggtagccgaggccggcaaaggcaatattgaagcgagcgtcgcccgccgattcgcgccggcccatgtgcccgaggtaggccgtggccttgccgaaagcgtaggagccgcccaccgagtagttgcgcacggtgttgccgccgtcggcgctcttgcgctggtcataggccgcgcccagcgccagtgcgccctgctggaacatcagcccaccccccagcgtgatgccgcgcgccaggctgccgggctgctcgccggtgccatagtccaactgcagcgtgaacggtcctgcggtcttcttgtagaccatgctgttgttgatgcggtagtcctggaagaagatgtcgccgccgatatacagcgggtcggaccagaaattgccccagccctggtccagcggattgaaggcccagccaatattgttcagcgcgttgtactggcgcccgaaggtcaggctgccccagtcgccggaaagtcccgcataggcctggcgcccgaacagcatgttgtagctggagcggccgtcgtcgctgccgatgccggcctcgagccggaagatgacgtggttgccgccgcccaggtcttcatcgcccttcaggccgaagcggctgccgaccatgccgccggagaccagtgcggcctggccgttgtggtggccatccaggttggaggtgtagcgcacggcggagctggcgatgccgtacagggtcacgcctggctcggcgtgggcgttggtgccggcgagggcggcaagggcgacgaaaggcaaaagcccggccgccagcagccggtggctggctgtctggttcatggatttcctccggaagtccgacccgccccggtgcttgcagcgcgccggcgcggatccgtcaggccgatggcctgcgggttccagtcccgcgcgggggcgcgcgggtcgtcatcgggcgcagcgcaacggatgcgcagggcccgggcgaaggtcgaagtgggcggcgatgcctggttggcggcgaatgccggcagtgttgccgggcaagccttgggcagcgccggttgccggcgccacgggagcggcccgaaggccattgagcgggttcgccggcgcccacttcggcagtcatggcggcctgggccgatatgactggggaggcatgttccgggtcgtcccgggtgcggcgaacaggcgctagtttacctgcattgcgcaaatgcccccggaaagtgcgtcatcgggcgcagcgaggcggcgcgatcagttgccggcagcggtggccggcgcatcgcgcgacaggcccaggatccagttgcggaaggccgccagcgcttcggattcgggccggccctccggataggcgaagtagtagccctgctgttcgtccagcatgcccgccagcggaattaccagctggccggtccgcagctcgcgctcgatcagcaggcgcggcgccaggccgatgccaagcccggccgtagcggcggccgtcatcatcgtgaacagctcgtagcgcggcccgcgcgaggcggccaggtcataggcccagccctgtgccgcgtaccagtcgcgccaggcgttggcgcgcgtgctcaggtgcaggtggcggcagcgcgccaggctggcggcgtcggtcacgggatgcccggccaggaaggcggggctgcacaccggcaccatgccgccttcgcggaagatcacgccgccgcgcgtgccgggccagaactggtcgccgaaataaatcgccgcgtcataggcgcattcctggaacgagaacggctgcgagcgcgccgccaggttgaccgtcacattgggatggcgccgcgcaaagtccggcaggcgcgggatcagccattgggtggcaaaggtgggcaccaccgccagctccagcgtgtagcccatggcccggccggtggtgatttccagcgtgtcgcgctgcaggtggtccaggtgccggcgaatgcgcgcggcgtattcgcgcccggtatcggtcagctccaggcgccggcgcacgcgtgtgaacagcgccacgcccaggcgctgctccagctgcgccacctgccgccccaccgcgctgtgcgtcagcgccagctctgccgcggcgcgggtaaagctgcccagccgcgccgaggcctcgaaggcctgcagcgcgcccaggttggggatgtcgtttctcatgggactgcgagggaaggaaggctgacagtataaacagcggcgccaggccgcaccgctaccgcggtcgtgcgccgcacgcacaacgttgtgcgcaatgcgcgcttgtgcgcgccatgggggtgcccctatcctgccccgcgtatcgtcgccagcccggctgccatcccagtgctcacctgtttgtgcccatgacctccaatctctccacgcttctcaccgccaacgtcggcgccgcccgcgccgcgcaactgctcgcgctggtcaccttgcccgcggatttgccgcaggccccgcagggccgtgccagccgcgcggaaatcgcccaggccctgaacatggtgctgttcggcggcatcctcgagcgcgtgccgagcggccgcgcctacaccgacgacgttgcctccgccggcggcaaggtcactttcgaccacggcgcgctgcgcacggtcaagtggcgcgacaacggcgcgctgcccgaaggcgaggccgccttcacccgcatcctgcgcccgctcggctacgtgctcaacggcacctatccgctggaccgcatcggcatgaccggtcgctcatacgcgcatgccgacgcgcccgagggcatcgcccagttcttcctcagcgaattccatccggaacgcttcagcgacgccttccgcgccgccgtcagccgcgtcaccggcacctccgccgacccgctcacgccgcgcgcgcagaccctgctgtggcaactggagcgcgacggcgcgctggacctggccgacggcgccgagctggtcggcctgctggtgccatgcttcgagcgccagcacgccaccccgagcctggccgactatgaaacgctgctcagtgaatcggccgagatggcctgggtcgccaccgaaggcaacgccttcaaccacgccaccgaccgcgtcgacgacgtgttcgcgctcgccgagcagcagaagcagctgggccggccgatgaaggacaaggtcgaagtctcgcgcagcggccgcgtcaagcagaccgcgttccgcgcggatacggtgcgccgcgccttcgtcggcgcgcacggcgagacggtggagcgggacgtgccgggatcgttctacgagttcatcacgcgcgatcgctttgccgatgaagcggcagcgccgcagcgttatgacctggggtttgatgccgggaatgcgcaggggatcttcaagatgacggcggcggcctgctgattgcgatgaaggaggagggcgcgggcgcgtggatgcgccggccctttccctcggcccctctcccgcacgcgggggaggggagcaaaccattgttacccccgcttcgtcgatatcaccgcctcagccacattggccggcgcctcggcatagtgcttgaactccatcgtgtacgtcgcgcgcccctgcgtcagcgagcgcagcgtggtggagtagccgaacatggttgccagcggcacctcggcgcgcacgatcttgccgccgccaccggcgatgtcttccatgccgtgcaccatgccgcgtcgtgacgacagatcgcccatcacgttgccggtgaattcctcaggcgtttccacctcgacggccatcatcggctccagcaggacgggcctggcccggcgcatgccttccttgaacgccatcgagccggccatgcggaatgcgttctcgttcgagtcgacgtcgtggtaggagccgaacaccagcgtggccttgatgtcgacgatcgggtagccggccagcacgcctgactgcagggtctcgcggatgcccttgtccaccgcggggatgaactcgcgcggcaccacgccgcccttgatggcatcgacgaactcatagccgccgccgtgcggcatcggctcgaggttgagcaccacgtggccgtactggccgcgtccgcccgattgcttgatgaacttgccttccacgtccttgaccggctggcggatggtctcgcggtaggccacctggggcttgccgaccgatgcctccacgccgaactcgcgccgcatgcggtcgaccaggatttccaggtgcagctcgcccatgccggagatgatggtctggccggattcctcgtccgtggtcacgcggaaggacgggtcttcctgcgcaaggcggttcagcgcaatgcccatcttttcctggtcggccttggtcctgggttccactgcctgcgagatcaccggttccgggaagctcatgcgctccaggatgatgaccttgtcggggtcgcacagggtgtcgccggtggtcgcttctttcaggccgacggccgcggcgatgtcgccggcgcgcacttccttgatctcctggcgcacgttggcgtgcatctgcaggatgcggcccaggcgctcgcgcttggccttgaccgggttgtagacggtgtcgccggatttgaccacgccggaatagacgcggaagaagatcagctggccgacaaaggggtcggtcatgatcttgaacgccagcgcggcaaacggctcgtcgtcgttgggatggcgttcggcttcgcggtcgtcttcggtgtggcccaggatggccggcacgtcggcgggcgagggcaggtagtcgatgaccgcgtccagcatgctctgcacgcccttgttcttgaaggcgctgccgcacagcatcggcacgatctcgttggcgatggtgcgcttgcgcaggccgcgcttgatctgctcctcggtcagcggctcgcccgacaggtactggttgagcagcgtctcgtcggcctcggcggcggcttcgaccatcttgtcgcgccattcctgtgcggtcgccagcaggtccgccgggatgtcctggtaggcaaagcgcacgccctggctggcatcgtcccagacgatggccttcatcttgaccaggtcgaccacgccctggaaatggtcctcggcgcccagcgggatctggatcggcacggcgcggcccttgaggcggtcggcgatctgcgtctgcacgcggaagaagtcggcgccgacgcggtccatcttgttgacgaaggcaatgcgcggcaccgcgtacttgttggcctggcgccagaccgtctcggactgtggctgcacgccgccgacggcgtcgtagaccatgcaggcgccgtcaagcacgcgcatggagcgctcgacttcgatggtgaagtcgacgtgtcccggcgtatcgatgatgttgatgcggtgttcggggtagttgccggccatgcctttccagaaggcagtggtggcggccgacgtgatggtgatgccgcgctcctgctcctgctccatccagtccatggtggccgcgccatcgtgcacttcgcccagcttgtggttgacgcccgtgtagaacaggatccgttcggtcgtcgtggtcttgccggcgtcgatatgcgcgctgatgccgatgttgcggtagcgctcgatgggggtcttgcgaggcacagtgttctccatggatgaaacacgcttgaatagagtagcaccactggctgtttgccgttgtccctgccgtgcgcaggggcaacaccgccacggccccgtgccccggcatgagcgcgtgtctgaggcgggcctaggattcggcctcatgcgaaaccgatttctcccatcctgccagcgtccgcggctccctatactggcgcagcatcgcgccccgcgtgttaatcgccctgccatcccatgcccgggcagaatgcgcgccgtcgccgatgcgttcccggactacgaagccacgcatgacaaccatcctgatcgttgacgaccatccggcgatgcggctggtgctcaggcaccatctgctgcagctgcttggcgtagacgaggtgatcgaagcagacaacggacagtgcgccatcgagctggtgcgcgcgcgcacgccggacctcgtgctgctcgacctggacatcccgcgctccagcgggctggatgtggcgccgcgcctgcgcgcgatccatccgcaggtgcgcattctggtggtgacggcgctggacccggcggtgttcatcagccggtcatggcaggccggtgcgcagggcttcgtcagcaagacccaggacatcaaggaaatcctgcgtgcggtcgaggcggtgctggcgggctataccgtgttcccggtgctcagccgcggcggcgcgccgcgccaggccatgtcggcggatgaggagatcctgcggcgcctttccgacaaggaactggtggtgctgcagatgctggcgcgcggcatgtcctacaaggccatcagcgccagcctctttatcagcaacaagaccgtgagcagctacaaggcacgcatcatgggtaagctgcaggtctcgtccctggtggagctggtggactttgcgcggcgttgccggctgaccccctgatctcggtccatatcattagacatcgtatgacttggcggccgcacccatccagtgcgcgcgcgtcgctcagccttgggcgccggccggcgccgaggccttgcgcagccgttcgcggctgttggtcaggtgcatgcgcatggcggccttggccccgtccgggtcgcggcgctcgatcgcgtcgtagatgttctcgtgctcgatgctgacgcggtccaggtactgctcgcgctcgggcgtgctgacctgcaggcggctgcgcgggatcaccatggtgcccaggtggcccatgatgtcggtgaaatagcggttgccggtggcgcgtgcaatcgccaggtggaaggcaaaatcgctctccacggcgtcgttgccggcgccggcactgcgcttgagctcgtccagcgcctggcgcatcgcggccagctgcgcgtcggtgcggcgcgacgcggccaggcccgcggcctcggcctcaaggctgacgcggaattccagcatcgccatcacatccatggccgtgcccagcgcgtccggcccgatgcggaagggcgagggcgcctcggccgcgcgcgccagcacgaaggtgccgatgccgtggcgcgtctcgaccaggccgctggcctgcagccgcgacagtgcctcgcgcaccacggtgcggctgacccccatcgacgccatgatctccgactcggtcggcagcttgttgccgggcttgagctggccctggcggatttcttcgccaagggcttgcaccacttcttcggcaagcgtgcggccgcggcggcgcagcggcgcagaaacgggcggaacggactgggcggaggtggagttcggcatggtggatacgggcggggtttcccggacttgaccggttcgagatggcctcattatactgggttatcagtcatacgatgacagataacatacgcgaagtgatggtccagtgaacaatactgcgcccgccatcggaaatgccggagacaaccctgagatgaccccaaccgccgcccccatggcgtccgcccacaccccggtcgtgaccgaactgaccgtggtgcccgtggccgggcatgacagcatgctgatgaacctgtccggcgcccatggcccgtacttcactcgcaatatcgtgatcgtgcgcgacagcgccggccacaccggcgtgggcgaggtcccgggcggcgagggcatccgccagacgctggaagacgcgcggccgctgctggtgggccagcccatcggccagtaccagtccatcctgaaccgcgtgcgcgcggcattcgccagccgcgatgccggcggccgcggcctgcagacctttgacctgcgcatcaccatccatgcggtgacggcgctcgaggcggcgctgctcgacctgctcggccagcacctcgaggtgccggtggccgcactgctcggcgaaggccagcagcgcgacgccgtggagatgctcggctacctgttctatatcggcgatcgccagcgcaccacgctggactaccgcaccgagcccgatgccgacaacgcgtggttccgcctgcgcaatgaaggggcgatgacgcccgagggcgtggtgcgcctggccgaagccgcttacgagcgctatggattcaacgacttcaagctcaagggcggcgtgctgagcggcaacgaagagatggaagcgatcctggcgctggccgaacgcttcccgaaggcgcgcataacgctggatcccaacggcgcctggtcgctggcagaggccgtgcgcctgtgccgcgacaagcgcggcgtgctggcctatgccgaagacccgtgcggcgccgaagacggctattccgggcgcgagatcatggccgaattccgcactgccaccggcctgcccaccgccaccaacatgatcgccaccgactggcgccagatggggcacgccgtgcggctgcagtcggtcgacatcccgctggccgacccgcacttctggaccatgcagggctcggtgcgcgtggcgcagatgtgcgccgaatggggcctgacctggggctcgcactcgaacaaccacttcgatatttcgctggcgatgttcacccacgtggccgccgccgcgccggggcgcgtcactgccatcgacacgcactggatctggcaggacggcgaaaacctgacccgcaacccgctgcggatcgaaggcggcctggtgcaggtgcccaagaccccgggcctgggcgtggagctcgacatggatgccctggcgcgcgcgcacgagctgtaccagcgcaagggcctgggcgcacgcgacgatgccgcggcgatgcaattcctgatccccggctggaagttcaacaacaaggcgccctgcatggtgcgctgacgcagtaccggcaacgcccaaccggccgctgccgtgatcggcacggctggctgatctgataaagacactgcaggagacaacgatgtacacgttccaacgccagcgcgccctgcgcctgcctcactggctgcgcgcctttgcgctcggctctgtcgtcacggtggcggccctgaccgtgagcgccgccgcatacgccgcgccacaggagtggccgcaacgcccggtatcggtggtggtgccgttcccgccgggtggctccagcgacgccatcgcgcgcatgctgaccgtgccgctcaatgaaaagctgggccagcccttcgtcatcgacaaccgccccggcgcgaccggcgccatcggcgccaccttcgtcaagcgcgcgccggcggacggctacaccatgatggtggcgtcgatcggcgtgtatgctgtgaacccgttcctgcagaagaacctggcctatgacccggccaaggacttcgacctgctgaccgtggcggtgcgcgcgcccaacgtgctggtggccaatccacagttcccggccaatacgctgcaggaactggtggcctacatgaagaagaatccgggcaaggtcagctttgcctcgtccggcgcgggctcgtccgaccacctgactgctgcgctgttctggcagaagagcgccaccgacggcctgcacgtgccctacaagggcggcggcccggccatctccgacctgcttgccggccaggtcgacgtgtcgttccagaacgtcaacgccgtgctgcagcacatccgcaccggcaagctcaaggccatggcggtgacctccgacaagcgctcgccggtgctgcccaatgtgccgaccatggccgaggccggcgttaaggacgtcgaggtgtactcgtggcagggcgttgctgcgccgcgcggcctgccgcccgaggtgaagagccgcctgcacggcgcgctggtgtcgtcgctgaacgacccgaagatgcgccagaagctgtccgagagcggcttcgaggtggtggccaacacgcccgagcagttcaaccagttcgaggcgcaggaactgctgcgctggaagaccgtgatcgagaagggcaagatcgcgctggactgaagccatcgcactgaaccccagacactgcagcacagaacgcgccgggcatgcacgcatagcgtgccgcgccggcgctcgcgtcatcgacaggagacaacagcatgacccagggacgccgcaccttcctcaagcaatcctccgcactggccgccggcctggcagccggtccgctcgcgggcctgtcctcggcggcgcacgccggaccggactggcccacccgcccgatccgcctggtggtgccgtacaccgccggcggctcgtcagacatcatcgcgcgcctgatcagcaagcagctgggcgaggcgctgggccagtcagtggtggtggacaaccgccccggtgccaacggcaacgtcggcgcggcactggtcgcgcaggccaccgacaaccacacgctgatgctgtgcgatatcggcgcgctggcgatcagcccgtcggtctataccaagctgaccttcaatatcgccaaggacctcaagccggtgtcgatgctggcctactcgccgcacctgctggtggtgcatccgtcggtgcaggcggccagcgtgaaggaactggtggcgctgtcgcagcgcagccagctcaacttcgccgtgaccgccatcggcagcgcgccgcacctggccggcgtggcggtggagcaggccaccggcgccaagtggcaatacgtaccctacaagggcggctcgcaggccattgccgataccgtgggcggcagcgcccaggtgctgatgaacggcatgctggccacgctgccgcacgtgcagtcgggcaagctcaagctgatcgcccagtccaagcgcacgcgcatgccgctgctgcagaacgtgccgaccatcgccgagcagggcgtgccgaattttgaatccggaacgtggcagggcgtgatggctccggccagcatgcccgatgcgatggtggcgcgcctcagcggcgagctgatccgcatcatccgcgcgccggatctgcgcgcgcagctggtggcccagggggcggaggtggtgacgatgacgcccggggagaccgggaagttctttgttgccgagcaggcgcgatgggcgggggtggtgaagcaggcggggatcaagctggaggcttgatctgggctcgcgggccgtagctggttcttcgcagatttgcggggtgtttttgttgttgccaagggcgacaaccgaccgcatggcaacaagccaaagcagggcttcccaaatctagcgaagaccccccaataagaaaaaagccccgcgcactgcggggcctgcgcgatcaacccttcaccgcttccggcaacaacgcctgcggcaggttctgataacaaaccggccgcaagaaccggtcaatcgccgtcgctccgactgaagtcgaacgcgcatccgaagtcgccgggaacggcccgccatgcaccatcgcataggcaacctcgaccccagtcgggtagccattgcacagcacccgcccggccttgcgttccagcaccggcagcaggcgccgcgcggccgcgtggtcggcatcgtcgagctgcatcgtcgccgtcagctggccttcaagctgtcgcgccaccgccagcatctcttcgagatcgcggcataccaccagcaccgtcgacggcccgaacacctcggcctgcatccggtgatccgccatgaactgcgccgcggtggtctcgaacattactggccgcgcctggttggccccgttgccgtcgacgccatcgccaatgcgttgcaggccgtcgagcgacgacagctgcgccacgccttgctcaaaggcggcatggattccgggcgtcagcatggtcgccgccggcttgccttgcagcgcgccgagcgccgcggcgcggaacttgtcgagcgcggggccttcaatgccgatcaccagcccggggttggtacagaactggccgacgcccatcaccagcgaatccaccagctggcggccgatgtcctcgccgcgcgcatcgagcgccgcgggcagcaggaacaccggattgatgctgctcatctccgcatacaccgggatcggctgcgggcggcgctgggcggcctgcatcagcgccaggccgccggcgcgcgagccggtgaagcccaccgcctggattgccggatgcgtgaccagtgccgtgccgatggcattgcccgccccgaccagcagcgagaacacgccttcgggcaggcccgcgtcctgcacggcctgctggatcacgcgccccaccagttccgacgtgcccaggtgcgccgggtgcgccttgaccacgaccgggcagcccgcggccagcgccgaggcagtgtcgccgccggccacggagaacgccagcgggaagttgctggcgccgaacactgctaccggaccgatggcgatgcgctgcatgcgcaggtccgggcgcggcgggttgcgctcgggcagtgcggggtcgaaggtggcctgctgccagcggccttcgcgcagcacggtggcgaacaggcgcagctggccggcggtgcggccgcgctcgccctgcaggcgcgcgaccggcagcgcgctttccaggtgggcgcgttcgatcagcgtgtcgccgagcgcctcgatgccggtggcgatggcttcgagcaaggccgcgcgctgctctggcgtggtgttgcggtaggtgtcgaaagcggcttcggccagcgcacaggcgcgctcgacctcggcctggccgccgccatggaagtcagggcccagggcttcgccggtggcgggattgatggcctgcagcagggcttcggtgccgcgcacggcttgcgcgccgatcagcatgtcgccggtgatgtgcatggaaggattccttgtcagcgtttggaacgggaacgccggccggagggcaagtgccccgcggccggcctgtcgatatgcaatgcgagggcggcttgcttaccgcttactgcgggccgagcttgttgatcagcgcgcccagcatctccatctcctcgccggtcaggtcggtcagcggcgcgcgcaccgggccgccgtcgtggccgaccagtcgggcgccggccttgacgatgctcacggcatagccggccttgcggttgcggatggccaggtagggcaggaagaagttgtcgagcaggcggcccacggtgtcgtggtcatccgcggcgatggcgcggtagaagtccatcgcggtctcggggatgaagttgaacactgccgacgaatacaccggcacgcccagcgccttgtaggccgtggcatagacctcggccgtgggcaggccgccgaggtaggagaagcggtcgcccagcttgcggcggatgctgaccatggcctcgatgtcgcccacgccgtccttgaagccgaccaggttggggcagcgctcggccaggcgcgcgagttgcgtcgcatccagcttcgagttggcgcggttgtagacgatcacgccgatatcgaccgacttgcagacctgctccacgtgggcggcgatgccgtcctggctggcttcggtcaggtagtgcggcagcaacagcacgccggccgcgcccaggcgctgggcttcctgcgcgtaggcgatggcggtgcgggtcgggccgccggcgccggccaggatcggcaccttgccggcgcaggtgcgcacggcggtgtcgaccacggccgagtagtcctgcggtgtcagtgagaagaactcgccggtgccgcccgcagcgaacagcgcggtggcgccgtagggggccagccactccagccgcgcggcgtaggactgcggtgcgaagtcgccctgggcgtcgaagtcggtgatggggaaggacagcaggccttcggagacgatttgcttgagttcgttgggtgcgagcattgcggcaatcctgagcgggccagtggccccgggtggcagtggcggctgactgcggcggtgcagatcatccgagttatcagtcatcgtatgacaaggctctggcgaaggcaatagggcttgtgatcattcggggttaaccgggatgcggccggcgttttcgctggaaagccctgccggcgagcaaaaagggacagaaacatgccgtctggggcacttcaagcatggatggcggccgtcgtaccgtgggtgagctccggtggggcaggcatgtaatgttgtaggacaacgtaagtcggagtggtttctgccagcgcgcctgccactcaggaaatttgaaacacccatgcaaagctgccggtgcacgggcccccggcgactggcacactggcatcctggactgacggggagaacatggtgggagagttacaggccttgctggaaaaccacgggctgatgctggtgttcctgaacgtgctggtcgagcaggccgggctgccggtgccggcctacccgatgctgttcgtcgccggcgcgctgggcatgcaggagaccgggccgtcgatcggcgcggtgctggctgcggtgatctttgcctgcctgattgccgataccggctggtacttcgccgggcgccggctggggcagccgatgctgcgcacgatctgccgggtatcgatttcgcaggactcgtgcatccgccagacccagtcgctctacctgcgcgtggggccgcgctcgctggtgatcgccaagctgctgcccggtgccggggccttgtccaccgcgatggcgggcatgaccggcacgccgttgccggtgttcctgttctatgacgccatcggcgcgctggtctgggctggcagcgccttgctgatcggcgtggtgttcagtgattttatcgatgccatcctggaggcgttcagcgcctacgggcatatggccgtggtggggctgttggtggcgttcgcgctgttcctggcgtggcgctggtggcgccgcttccggctgctgcgccgcacgcggcgcgtgccgcgcatgacggtggatgagctggaagcgcgccggctcgccggcagcctgccggtggtgatcgacgtgcgcgcccacggggacacgccgatggagcgcatccccggctcggtggtgctcgacatgcagggcgcgctggacagcctggacgcgttaggcgtgccgcacgccggggccgacatcgtggtctattgcgcctgccccaatgaactgtccgccgcgctgctggccgagcgcctgcgcgtggccggctacccgaagacctgggcgctggccggcggcttcgacgaatggaagcggcgccacggcggcaccgccccgaccgaggcggccaaccagccagggccggccgaagccgcctgaacctgccaggccgccggcgctgcgctcagcgcttgcccgcggtctggaataccgacaggtccgggtagaccgcgcggatcttctcccattcggcggcattgaagaactgacacttgccggcgccgaagcgcttggacacctccacgcagaagcgcacggcttcagcgatgtcgatctcatggttggccgaggtcgcgctgcccgacaccaccgaccgcgccgtcaccgccacgccgaccaccggcgcccgggtggccacgtgcggctgcatgatgctgttgaagtggtacaggccgttgtggtaaggcgtgatgtcctgctgcgagatcgggaaggtcaccgccgggcagccggtggtggactccatggtcgccaccaggtccggcgccacgcgcaggatgtagccctgcatcgccgtcggcgaaatcgcaaagccgcggtgcttgatgatgctgttgcccttggaggcatcgatcgacaggatcgcgtccatctccggcagcacctggtagtcgttcatggtgtcggacgagaccggcatgcccatgaacggcaccgggtcgtgcggctgcatcgagacattggtcgacaggtgcgtggtcacgatcacgtcgcccgccaggtggtcgtcgcgcgccttcatctgcgccagcttgagcgccaccgccaggcagccgatcgggccgtcggcgtcagacaccagccccaccagttccgggcgcgcgccaatcgcgccgttgcggccgatcacgcccagcgtcggcgcactgccgccgctacgcttgcccgtggtgccggggatcacgatggtgatgaagtcggtggtgttggccgtgttctcgggcggggcgttgtggatcgtggtcacttccacgctcacgccggcgccggcatagggcgcgaacagttcgctgacgaccgcaccgttggcgtgcgggctgtccagggcttcatgaatgaccagcgtctgctgcagggccatggctttctccaaaggatgtgccatgcccgctcggcgcgggcatggcgtctacgaaaagtcagaactggtgacgcaggccggccatgaccgtggtctggttgtcgcgcccgtccagcggcttgccgctgccgccggtccagttggtggtgttgttgccgaacaggcccgaccagccgccgcgcacccagtcataggccaccgccaggtaggcatcggtgcgcttgctgaacgcatagccggccacgccgtatgccgtggtgcggttgccgctgaagttgtcggcgcgggtgcggttgtgcatcatgctggcggtcagcgtgacgttgcccgggacggcgtagttggcgcccagcgtgaagaagtcgtcgcgccggctgctgccgaagaccgagttgatggcggcgcggttggtggccgtggcggcggtcgacatgctggtgatggtggccgtgtcggtgccgcccttcgatgaatcgaaggcggcgtcgcggtcgctgtagatgtagttggcaaacaggttggcgcgtccgaccgcggccttcaggccggccatgtagatgcgcgcggcgcggctctggctgtcgcgggtctgctggaagtcgccgatggcggtgatcgggccggcggcgtacttcaggcccagcgacatcgacgaggtcgccttgctgttgcccggggtttcgcccagcgcgtattcggcgatgacggacaccgggccgaagttgccggtatagctgacggcattgtcatagcgctggccggtcaggtaaaccatccaggagttcgacggcgccgcgcccacgccgagcggatcgacgtagtacagcatggtgttggccgtggtgtactgccggcccagtgccagatcgccccactggttgccgatcttcacgtaggcctggcgcccgaacagctggccctgctggtccagcctgccggtgtcggccaggaagccgttttccagcacgaagccggctttcacgccgccgcccaggtcctcggtgcccttcaggccgaagcggctgcccgacaggaagccttcgccgccctgctgcagcccgatctgggcatcgcccgccgggttcgaatgggtctggtaggtaagcgcggtgtcgatcacgccgtacagcgtcaccccggaccgcgccatcgcggcggccggcaggcccagcagcaacggcagtgccaggcgggcggcgtggcgaatggtgtggctcatgttgttttctcctccaaaaggcaaaagggggcccgcgcgggcggcactgcgcggcccgcggggcggttttctctttgttgtgcccgggaccggcccgggtcagtgcgtcagcggctcagggcagtgccgccggctcaggcagcaaatcccggccagtcctgcattccggccggaccggtgatctgcgacagcgggaagatctcgccctcgcgaatcgtttcgaccttgccttcggccggaaaccacagcgcatggcgctcgcccagcacggtgccgcgggtgccgtccgagaacagcgccgaaccctccggcagcgcaaacacctgctccggcgcgttgatgtgcaggaactcggccaggcgctcttcgcggctttcgccgttgtggccggcgggcttgccgctgatgaagtgcgggttgatctggaacggcaccagccccagcgcgcgcagcgacggcggctgcacgatgggcatgtcgttggtggtgcggatggtcgggcaggcgacgttgctgccggcgctccagcccacgtatggcgtgcccgcgcgcaccctggcgcggattgcgtcgacgatgccggcgtcgtacatgcgcttgagcagcgcaaaggtgttgccgccgcccaccgcgatggcctcggcctgctccacggcgcgcagcggatcggcgctgtggtggatcgattcgagcgcgtagcccagcgtctcgaacaccggcttgaccatgccttcataggtgtcgaagctgaaggtcacgccggcgaacggcacgaacagcaccttgcgcggctcgcgcctgagcagcgtgtggatctgctcgccggcgtgctcgaggtagccgaggttgtccttgcgcgagctgctcatcaggaggatgcgttgggtcatgtcttggtttccgtcaggagagtctggtgaagttcaatgcgcgatcaggcgatcgcggcgcggatcagcgcggcgacgcggtcgatctcttcatgcgtgttgaagtagtgcagcgagacgcgcgccatggtggacacgccatggcgcgccaggatggcgtcggccatgaagttgccggcctcgatgatgcattgctgcgtttccagcgcggcgacgatgcgcgccgggtccacgccgcgcacattgaacggcacgatgccgatgcggttggccacgtcggccgggccgtacagctcgaagccgggggtcgacgagaacttcgccaccgcgtactcggtcaggtcgcgcacacgcgcttcgatggcgtcgatgccgatggcggcggcgtaatcgatggcggtgcccatgccgaggatcgccggcacgatcgggcagccagcctcgaagcgcctggcgccagcgacaagggacagcgcgcccgtggcacggtcataggcgccgttccaccagcccaccagcgcgggctcgacctgctcgatcagcgcgcggcgcacatacaggaagcccgagccctcggtcgcgcgcagcgccttgcggccgcagcctgccaggaaatcgcagtccagctcggccacgtccgagcgcagcatgcccacgctctgtgccgcattgaccagcgacagcacgccatggcggcgcgccagcgcgcagatctgcgcggccggctgcaccgcacccgtggaattgggcaggtgcgagaaggtgagcaggcgcgtgcgcgaggtcacggcggcctcgaacgccgcgggcgacagcagtccttcggcattggccgcgaccatcttcacgacgatgccgtgcgattgctccagccggcgccagggcagcaggttgctcagcatctcggtgtcagccaccagcacttcgtcaccggccttccaggcgatgccgcgcgcgacgatcgagatgctctcggtggcgttcttggtgaaggcgacttcgtcggcggcgcagttgagcagtccggccagcttgccgcgcaccgcttccacgcgcgcataggtctctttgcggaaggccggcaggtagatgccgacgtggccggtatcgagcaggtagctgcgcacggtatcgagcaccgcgtcgggcggcaacgaggccgcggcggtgtcgagatagatggtggaggccgtcagcggggtgtcggcgcggatcgcctggatggcttggatatccatggaacgtctcgggtaatgacaggcgggacgcggcgaccgcgccccgaggtaagactcagttgcgcacttacttgcgcagcttggtgacggagccgaagaagctgaacagggcgtcgccggcaatcacgccgccggcgaaggcgctcatctcggccacgtgcttgtcgccgcgcaggcgctgcagcacgaagcggatcgcgaggcctgccagcactgcccagccggccagcggcgaggcaatcagcatgccggtggagagcaggatgccaagctggcgcctggagccgccgatcagctgcagcagcgcgccggggatggcccagatcaccaggttgcgggcaatctccgccgacgagcccgccttgatcgaggccgcgtagacgcggtccaccggcgggatcatgttctgcgcgaagaaggtgccgtggaacaccagcactaccatcgcggccacggcaaagccgatcatcgcggccaggaactgctgcttgcgcccggccagctcggcctccatgtcgcggccttcgccgcgcagcaggtagccggtcttgaggtcgtagcccatgtcggcaaaggccgggccggtggcggcggagaaacccaccagcaccgccagcgccgtcggcgggaagccgatcaggatgccgatggtcagcgtgatcagcgctaccgcgaaggccgggaaccagcccgaatgcatcgccgcgatgccgacgatcagctcatgcacataggcggcaaaggcggcatagagcacgaacaccaccagcatgcccagcgacatgtccgagacatggccggccagcaccgagatcagcagcgcaatcgccaggtagatcaggaagccgcccgacaggatgcggctggcgcgcgaggccgggacttcgatggtgcacgtgtccgcggccggggcatggcgcgcgcggcggatctcattggcgacctggaacagcgcgacgatgcccgcgccgatcatcagcccgtgcgggatataggccttggcgatgtcgatgccggtcagcgccaccgaatagccgcgcaccagcaggccaatgccgaacatggtcagtgccgccaggttgcccaggaaggccgcgccgaacgcggacatcggcacgcccagccaggcgccgcccacgcccacggcaatgcccagccccaggaacgcggccttgcgcccgccgcggtcgccagcccagatggcctcggccgtggcgatgccggccggccaggtgccggtggcgggaaagatcctgctgccgaagaggaagtacagcatggcgccgtcaacgaacatggcgatcaccgcgccgatcagcatcggcgtggccagttccggcatgcccatcgcgtatggcacgccgatcgggatcatcagcgagttggcggcgccgaaggtggccgacgagattgccgtctgcaccaggttctgccgctccagcacgcggaagcgccgcgtgatctccagcgggatgcgcgagaacacgatcgcgatcagcgcgccgatgatcgaggtgttggccgagatccccagcgacacgatcagctgcatgccgatcatggcgccgaacaccgacagccccacggagaccagcagcagcaagggctccatgaagcgtgtccgtgttgcaggctgcgccgccatcggcgcgttcagttgtgttggcatggtcatttgtccactgctccccgtagtgttgtctggttttgtctgttgtatgtgatgccttgcgcgcgctcagcgcatgaaacccgccaccgggccgatggtgttgcgcgcggtgcgcagcgcctccagcaagcgcggcacagcttcaggcgtcaggcgctgcagcgggccggcgatggccagcgatcccaccaccgcccgggtgtcgcggtggcgcagcggcagcgccagcccggccaccgtggcggcggattcctcgcaggtgtaggcccagccgtcggcgcggatctgcgccagccgtgcttccggctcgggcgcgtcgcccgttacctggcgccggaacgcttccggctggaatgccaggatggccttggcgtgcgcgcccgcgtccagcgagaagcgctggcccacttcgatcgaaaagcgcagctggtgctggctctgggcgatatccgtgcacaagccctcgccaccgtccagccacgacaggaacacggtctcgccgcattcgcgcgccagcgcttccagcgccggttgcaccacctcggccggcgaaaacgtcttgcgcatcacttgtcccagctcgaaccagcgcaaccccaggccgtagcggccaagcgcgtcctgcaccaggaagccgttggcggcaaaggtcgccagcgcgcggtgcaccacggcgtggtgcacgccgctgtagcgcgccagttcgcgcacgccccagctgggctggcgggcggtgaagtgggtcaacagcgccagggcgccgtccagggtcttgagcatggcgggtggttgcgtcgactgtttgtgtctctatataagagacagcgtctctgatacagagaaatgctaggcttggtcccggctctcaacaatcagggttaacgtggggccggctggccgcgccgggcgaatgccggcggcggcaacggcggagcgccgccgcctatacttggcgcagaccgactgttaccgggaggacgcgcatggccgcggaacaccacggaaccggcggatccggcgacgaggccacccgcatcgcccagcgccgccgccagctcggcattgcgccgcgcgccggcgatggccagcgcaactgggccctggcactgtccggcggcggcatccgcagcgccaccttctgcctgggcgtgatgcaggcgatggcgggcaccgcgatgcccgccaaggcggcagcgccggcccccgcgccggaagccgcgacgccggcggccgccgccgcggcgcagaccgtgccgggcctggcctcgctgctggcgcagttcgactacctctccaccgtcagcggcggcggctacctcggcgccttcttcgtcagcctgttcgtgcccggccgcctgcgtcggggcgcgggcccggtccaggccgccaccgacgcctatcacacgctgcaatgcgagccgccggggcgcatccatacctcggtgtcctatgccgcggaccccggccgcggcgcggtcgcatggctgcgcgagaacggccgctacctgtcgcccaccggtgccggcgacaacctctatgccgccgcgctggtggtgcgcaactggctggccatgcatttcgtgatcggcagcgcgctgctggtgctgctggctgtgctggcgctcgggcaacacatcgcggtgggggtttcctacggattggggcgctatgagatggacctgctgcacgacgcgcgccaggccttcaaccagggcgaatgcgcgatctggtggagcacgctgctgtggctgccgctggccaccgcgctggctggcgcggtgccgcccgggctggcctactggctgatctacccgcgcgccaacgatccgcaggcgacggcccgcttcctgagccccgcgccgctgctcgccacgctgctgggcctgatgctgctggccgcggcgcgctggtcggaatggctcggtccggggctggtcatcggcaagctctttgccgcgctgggcgtgctgacgctgctaggtgtgctgtggtgcctggcgctgctgcagggcgagccgcgcaccgtggccgcctaccgcgtgcgcgccacgcgcgcactgcgtggcgcgctgacgctgaccctgtggctggcggcgctgggcattgccgacaccatcgcacgcaccgcttacctgtttgcccaccaggcccaccaccagtggggcgcggcgctgcccgcaaccgtgctgggcgtgctggtctggctggtgcgctacggttcgcgctggcgcgacgccggccgccagggcagcaccgacacgccatggcgcgcgctgtgtgcccggctgccggtatcgctgctggcgggcgcggtggcggcggtgctggccctgctgctgttcgtgctgtggtcgtggctggtgctgtgggtgcgctgggacgggcgcgagccggtcgactggctggtgttcggcaacgcctataccggcccggcgctggccacgttcactgtggtgagcctggtgctggcgctggtggcggggcgcttctccggcttcctgaacctgtcgacgctgcagccgttctacgcggcgcggctcacgcgcgcgttcctgggcgcatccaacggggagcgcttcgcggctcccgacccgagtgccggccgcgacggcagccagcgcgcccgcttcagcgtggccgagcccgtgcccggcgaccagctcagcctgaacacctactacgatccgcgcgtgctggcgccgctgcacctgatcaacgtcacgctgaatctcaccgtcgacccggccgagcaactggtgcagcgcgaccgcaagggcaagccgctgtgcctggcgcccggcccctgcgtggtgctgtccggcgtggcggcggcgatcccgccggacgcctacgcgcgctttaccatcgacggccggggttgctgccccgacgtttcatggccgtcttcgggcaaactggccgaatcgcgcacggtgggagattggatggcgatctcgggcgcggccgtctccaccaggctggggcgcgcgaccacgctgggcacatccatgctgcttggcctggcgaacctgcgtctgggcatatggtggccgtcgtatccggccagccacgcgcgcgaaggcgggcgccggggccgcgcgcggcgccatccggaacgcgccgcgcatccatggctggccgcgggcatcgcgcttttccgcacgcagtactacctgggctgcgaactgagcgcgcgcttccacggcacgcggcgcggctggcagtacctgtccgatggcgggcatttcgacaacaccggcgtgtacgagctgctgcgcccgggccgcgatgtctcgctgatcgtgctgtgtgattgcgggggcgaccccgactaccgcttcggcgacctggccaacctgatccggctggcgcgcatcgaccatgggctggagatcgtggtcgataccgaggctgccaccacgcacccggtgctgagccgtgtcttcggcgtgccggatgatttcctgccgggcgcgccgaccggcgacaaatgcgcggtgctgctcaatgtctttcgcaccggcccggagtgcggggcgccacgcgcacgcacctgccgcatcgtgctgctcaagccgcggctggtgtcatgggcgccggccgacgtgcgccactacggcgcgacccatcccgcgtttccgcaggaggccaccggcgaccagttcttcgatgaggcgcaatgggagagctatcgcgcgctgggccatgcgatcggccagcgcgtgctgggcggggccgtgggcaaggcgctgctggtgtgaagagacagcgcgtcagcgcacgaagccgatgacgtcttccagccggccgctggcatcgcgcagcgcctccagcaggcgcggtaccgcggcttggtccagccgctgctgcggcccggcgatggcgaccgagcccaccaccgcgctgcggtcgcgcgaccacagcggcaacgccaggccggccacgctggcggcggcttcctcgcgcgtatgggcccagccgcgctcgcgcacctcggccagctgctgctcgatgcgctcgcggtccagcgtcgtgtgtggggcgatgcgcgccagcccctggcggtagacctcatcgcggaaggcatcgtcctggaaggccagcatcgccttggcatgcgcgcccgcatagagcgggaagcgctcgcccagctcgatcgaaaagcgcagctggtgctggctctgcaccagtcccacgcacaggccctcatggccatcgagccacgacaggaacacggtctcgccgctttgcgcggcgagcttttccagcaccgggcgcacgatctcgtcgggcgagaagctcttgcgcaccacctgtcccagctcgaacaaccgcagtcccagcgaatacttgccggtggccgcgtcctgcaccaggaagccattggcggcaaacgtcgccagcacgcggtgcaccacggcgtagtgcacgccgctgtgcttggccagctcgcgcacgccccaggtcggctggcgcacggtgaagtgcgtcagcagggccagcgcaccgtccagtgtcttgagtgtcatcgcttgttccttggcatcgggctgcatggtacgggcaagcgcggcgcgactcaatccttcccgcgcccccgtgatacccacgccgcccgaagggccgcgatcaggccgccagcacgatcgcgccatggtctctaagatagcgggccatacgcattgcccgcgtgcggcatcggtcgcccgccatccaccacatgaatcacgactctattcccaacggcgcaggcgtggcctggtccgtgctggacctggcccccatccctgaaggcagcgatgccggccaggccatgcgcaactcgctcgacctggcccgccatgccgagcggctgggctaccaccgctactggctggccgagcatcacaacatgcccggcattgccagcgccgccaccgccgtgctgatcggctatgtcgccaacggcaccaggaccatccgcgtgggctcgggcggcgtgatgctgcccaaccattcgccgctggtgatcgccgagcagttcggcacgctggcctcgctctacccgggccgcatcgacctgggcctgggccgcgcgcccggcaccgaccaggccaccgcgcgcgccttgcgccgccacctgtcggccgacagcgccgataccttcccgcaggacgtggaagagctgcaggcctatttcgacgacgtgcgccccggccagcgcctgcgcgcggtgcccggcgccgggctcaaggtgcccatctggctgctgggttcgagcctgttcagcgcgcagctggcggcggcgatgggcctgccgttcgcctttgcctcgcactttgcgccgggcttcatgcgccaggcggtggacctgtaccggcgcaccttccggccctccgaagcgctggaccggccctatgtgatgctgggcctgaacgtgttcgcggccgagaccggcgaccaggcgcgccgcctgttcagctcgctgcagcagcagttcctggcgctggtgcgaggcactccggggcagctgcgcgcaccggtggacgatatcgaagcgctgtggaccgagagcgaggccgaccatatccgccgctcgctggcgtgctcggtagtgggcgatcccgacgccgtgcgtgccggcatgcagcgctttgtcgatgacctgcgcccggatgagctgatgctgaccgggcagatccatgaccaccaggcacgcctgcgctcgttcgccatcgctgccgatgcggcgcgtagcctgaagacctcatcagcgctctgagcgcctgcgatgctccggtatggcgtgcgccgcacttgcggcgtgtgcccgccggcgcgccgcgaatcctgtttgcgcccggccgatccgctcggatacattagaaggcccgagaccgagagaggcgcggctcccgcagcacgcgcccgacagttcgcacgatccaccgccccatccgaaacatggggccgacggcagcgacgacaggagacagcgatggacctgcggcaacgcgagcacatcgagacggtggtccaggccaccacataccttgccccgccggccgtgcttgcggaccggatcgcgcacgacgccatcatccagaactcatggcgccgctgcgtgcaccagtacggcctggatccgtcgcgcatgcaggaggcgcgcatcctgccgcagccgcgcctgcgcgaacaccaggaacgcatcgacgacttcgcgcgcatcgcgcgccacggcctgcagagcctgtatgggcaagtggcgggcctgggctatgtggtgctgctgaccgatgcgcagggcgtgaccgtcgactatatcggcgaggcccgcagcgatgccgcgctgcgccacgcgggcctgtacctgggcgccgagtggagcgagagcggcgccggcacctgcgcggtcggcaccgccctggccacgggccaggcgctgacggtgcaccaggccgaccatttcgacgccacccatatcccactgacctgcaccgccgcgccgctgttcgacacgcacggcaacctgcacgccatcctcgacatctccgcgctgacctcgccgcaggccaaggacagccaggggctggcgctgcagatggtgcgcatctacgccgcgcatatcgagaacgccaacttcctgcgcgcgcaccgccgcgactggatcctgaagctgaacgtggcgccggagttcgtcgacgtcaatcccgaatacctgctggcgctggacgaggcgggccgcatcgtcggccataaccaccgcgccaggctgatgctggaaggcgagctgggtggcgcaccgggcgccaccgtgctgggccagcggttcgagacgctgttcgacgcgcgcctggaggacctgggccactatgtctattcgcgcccgagcgagcagcgcctggtggcgctgacccgcagtggcggcctgctgtacctgagcgtgctgccgcccgcgctgcgctggcaggcgccgcccgccgaaacgcaggtggcgatgccggatgccctggcggcgctgaccggcggcgatgccgcgctgcagctgcagttgcagcgcgcggcgcgcctggtcgattcgccgatcaacctgctgatccacggcgagaccggcagcggcaaggagttcctggccaaggcgctgcatcttgccagcgcgcgccgcggcgggccgttcgtagcggtgaactgcgcggcgatccctgaaacactgattgaaagcgaattgttcgggcacctgcccaacagcttctccggcgcaggcccgcgcggcaagcgcggcctgatccaggaggccgacggcggcacgctgttcctggacgagatcggcgacatgccgcgcgagctgcagtcgcggctgctgcgcgtgctggccgagggcgaagtgctgcctgttggcgccgcgcggccggtgccggtgcggctgcgggtcatttccgccacgcaccacagcctggagcaactggtggccgacgggcgcttccgcgaggacctgtactaccgcctcaacggcgcgcgctttacgctgccgccgctgcgtgcgcgtaccgacctggactggctggtccgcaagctgctgcaggaagggagcgcagagggcagcgagatcacgctgtcgcccgcggcacgcgagcggctgcaccgccaccgctggcctggcaacctgcgcgaactgcgcaacgtgctggagtacgcgcgcgcggtctgcgccgacggctatatcgatgtgccggacctgcctgacagcctggcgggacccgcaccgtccgccgccctgccgcagccagggcccgcccagtcacccgctgccgcaccgttcgacccgcaccagttgccgccggaaggcatgctgctgatgcaatacctgcgcgcgtccggctggaacctgagcgccgtggcgcggcagatcggcgtcagccgcatgacgctgtaccggcgcatggagcgctacggcatccagtcgcccaaccggcgcgacggcggcccggagcccaccgacgcataagccggcaggcagcacggcgcacgcgcgccgtctgtgcgatacggttgtccatcccctgtacacctgcgctgtgacacctgtcacagcgcagcgttgtttttgccctgccgtctcggggtaatccctcggatccgaccggctgatacccctgtttccgctgttttcactgcctgcgcgcactggcacagccattgcaaatacgcctggcaagacaacgacaacaggagacaggcaatggggcacgcagcaggcgccagcgcgcagatcgcgccagtggtcggcatcatcgccaacccgatttccgcgcgcgacatccgtcgtgtgatcgccaacgccaacagcctgcagctggccgaccgcgtcaatatcgtgctgcgcctgctggccgcgctggcctcctgcggcgtggagcgcgtgctgatgatgcccgaccgcgaaggcctgcgcgtcatgctggcgcggcacctggcacgccggcaggggccggactcgggcctgcccgcggtcgactacctcgacatgccggtcaccgcgcgcgtcgacgacaccctgcgcgccgcgcgctgcatggccgatgcgggcgtggccgcgatcatcgtgctgggcggcgacggcacccaccgcgcggtggtgcgcgagtgcggcgcggtgccgatcgcgggcctgtcgaccggcaccaacaatgcctaccccgaaatgcgcgagcccaccatcatcgggctggcaaccggcctctatgccacgggccgcattcctcctgcgcaggcgctggcgtcgaacaagcggctcgacatcgtcatccgtgacggcaacggcggctttcgccgcgatattgcgctggtggatgcggtgatctcgcacgagcacttcatcggcgcgcgcgccctgtggaagaccgacacgcttgccgccgtctacgtgtcctttgccgaccccgaggccatcggcctgtcatccatcgccgggctgctggagccggtgggccggcgtgaggagggcggcctcgcgatcgaactggccgcgcccggcgaaggcgaattcgacctgtgcgcgccgatcgcacccggcctgatgtgcaccgtgccggtggccggctggcagcggctcgaacacggccggccccatcgcgtgcgccagcgcagcggcattgtcgcgctggacggagagcgcgagctggccttcggcccggacgacgaagtcacggtcaccctgcatgaccacgcctttcgcagcatcgacgtcgcggcctgcatgcgccatgccgggcgccaccacctgatgcgcagcctgccgcagcccgccgcggtgggatgacgcgcgggcaccgcgtccgcccgcttttcccctttcttgaagtgcaacacctgaaaacgaaggagacagacatgacagccagagcttctcaagattccgccgcgctgccgctcgacaaggagacgttgctgacggtgtaccggaagatgcgcaccatccgcgatttcgaagaacgcctgcacgtggacttcgggcgcggcgacatcccgggcttcgtccatctatacgcgggcgaggaagccgcgggcgtcggcattctgcaccacctgaacgatggcgaccgcatcgccagcacacaccgcggccacggccattgcattgccaagggcgtcgatccggtggcgatgatgaaggagatctacggcaagaagggcggctcgtgcaatggcaagggtggctcgatgcatatcgccgacctgtccaagggcatgatgggcgccaacggcatcctgggcgcaggcgcgccgctgatctgcggcgccgcgctggctgccaagttccgcggcaagggcgaggtcggcatcaccttctgcggcgacggcgcctccaaccagggcactttcctggaaagcctgaacctggccgcggtctggaacctgccggtgatcttcgtgatcgagaacaacggctatgccgaatcgacctcgcgcgattacggcaccgcggtggacagctacgtggaccgcgccgccggcttcggcatcccgggcgtgacggtggacggcaccgatttcttcgccgtccatgaagcggccggcgaagtgatccggcgcgcgcgcgaaggcggcgggccgtcgctgctcgaatgcaagatggtccgcttctatggccacttcgagggcgatgcgcagacctaccgcgccgccggcgaactcgacgacatccgcgccaacaaggattgcctgaagctgtttggccgcgccgtgacccaggcgggagtggtcgctcgcgaagaactcgacaccatcgaccgcgaggtcgccgcgctgatcgagcatgccgtgcaggaagccaaggccgcgccgcagccgggtcccgaagacctgctcaccgacgtctacgtcagctactgatctgccacgcgctaacccaatatcaggagacaaaccatggctcgcaaactgagcatcaagctggcgatcaacgaggcgatcgaccaggaaatgacccgcgaccccagcgtcatcatgctgggcgaagatatcgtcggcggcgccggcgcggacggcgagaaggacgcctggggcggcgtgctgggcgtgaccaagggtctttacgccaagcacggcgaccggctgctggacacgccgctgtctgaatccgcttacgtgggcgccgccatcggcgccgcggcctgcggcatgcgcccgatcgccgagctgatgtttatcgatttcatgggcgtttgcttcgaccagatcttcaaccaggcggccaagttccgctacatgttcggcggcaaggcggagacgccggtggtgatccgcgcgatggtcggcgcgggctttcgcgcagccgcgcagcacagccagatgctgacgccgctgttcacgcatatccccggcctgaaggtggtgtgcccgtccacgccgtacgacaccaagggcctgctgatccaggcgatccgcgacaacgacccggtgatcttctgcgagcacaagaacctgtacggcctggaaggcgaggtgcccgaaggcgcctacgcgatcccgttcggcgaggccaatatcgtgcgcgacggcaaggacgtgtcgatcgtcacctacgggttgatggtgcatcgcgcgctcgaagcggcggcaacgctggccaaggagggcatcgaggccgagatcgtggacctgcgcacgctctcgccactggacatggacacggtgctggagtcggtcgagaacaccggccgcctggtggtggtggacgaggccagcccgcgctgcaatatcgccaccgatatctccgcgcaggttgcgcagcaagccttcggcgcgctcaaggccggcatcgagatggtgtgcccgccgcacacgccggtgccgttctcgccgacgctggaggacctgtacatccccagcgccgcgcagatcgcggccgccgcgcgcaagaccatgaagggaggcaagcactgatggcaaccgaaatttcccccacgattatcccgatcgtgatgcccaagtggggcctgtcgatgaaggaaggcacggtcaatgcgtggctggtcgacgaaggcaccgagattaccgtgggcctgccgatcctggatgtggaaaccgacaagatcgccaatgcggtggaggcgcccgacgccggcacgctgcgccgcaaggtggcgcaggccggcgacgtgctgccggtgaaggcgctgctgggcgtgctggcacctgcggaggtgagcgatgcgcaaatcgatgactatgtcgcggcttatgaaacgccggcggacgacgctggcgaagaggacgccgctgccgcgtaccagtttgccgacgtcgacggcatccgggtccgctatgcccgcaagggtggcggcgccgaaaccgtgctcttcatccacggatttggcggagacctggacaactggctgttcaacctcgatcccctggccgacgcgtacaccgtggtggcgctcgacctgcccggccacggacagtcgtcgccgcggctcgcgggcacgacgctggcgcagatggccggctttgtagcgcgcttcatggacgagaccgggatcgaggcggcgcatgtggtcggccattcgatgggcggcggcgtggcggcgcaactggccgtggatgcaccgcagcgggtgctgtcggtggcgctggtgtcgccggtgggctttggcgacgccgtcaacagcggctataccgaaggcttcgtcagtgcccagtcccggcgcgagctcaagcccgtggtcgaactgctgttcgccgacgcggggctggtcagccgccagatgctggacgacctgctgcgctacaagcggctggacggcgtcaccgaggcgctgacggcgctggggcagggactcttcggcggcggccgccagagcgagcagcctggccagcggctggccaacagcggcaagcgcgtgctggtggtgtggggcggtcaggaccagatcatcccggccgcgcacgctgaagccgcgccgccgggagcaaccgtcaaggtctttgccgatgctggccacatgagccagatggagaaggccaatgacttcaacgcgctgctgaagaagcatctgggcggctgatgccgcgcgcggatggcgccgcccagggcgccatccgctcggccagctcgccttgttccaattcaagacaggagacctcatgaccacagacctgaagacccgcctgaccgagatcaacaggcaattcggtgcgctcggccaggcccagcccgccgccatgagcgccttccagggcgtgatgaaggccgccacgcaggacggcagcctgcccgccgccgtcaaggaactgattgccgtcgcgctggcggtgcagaagggctgcgacgactgcgtgctgttccacaccagccaggcgctgcgccatcgcgccacgcgcgagcagctcgccgaagtgctggccatcaatatcgagatgggtggcggacccggcgccatgtacgcgtcgaaggcgctggcgtacttcgatgcgctcaatgcctagtgttgctagactcggcacgttgctatccggaggttggtgccatcccatgccgtttgaatttattgatgcggcccatgccgggcaggcgggcagcgacccgctgcaggatgagctggccttgctcgacctcgcggcacaaggccggcaggtggcgcagctgtgggaggcgccgctgtcgctggtggtgccgcgcacctacctgcgccatgccgcgctggaaaccgcgcgcgccgacttcgcgcagcagggatgtccggtattcctgcgcatgtccggcggcgggctggtgccgcagggccccggcatcctcaacctgagcctggcctacacagtggaacagccgccgggcgcgcgcagcgacgcggtctacctgcacttgtgcgaggtcatcggcgacgcgctgcaatcgctgggcgtcgacacgcactggcaggcggtggccggttccttctgcgacggccgctacaacctggcctggggcccgcccgaagccgcgcgcaagatcgccggcacggcgcagtactggcggcgcgcacccgcggccatgcaaacggccgacgggcagcgccacctggtgctggcccatgcggtgctgctggtcagcgccggccccgtgcagatcaacgcgcgcgccaatgcgttcgaagcggccatcgacagcggccggcactatgacgcgggcaaggtcgtcagtgtgcgcgaggcattgttggccagcggccgcgcggtcgatgacgacgccgcgctgatggcgcaggtatcggatgcgctgcggcgaagcgtggggcagacgccgccaccggcgtagctgcttgaccgggcgacgccatttggcgatccccaaaaaaatcgcggcccacgcggggccgccaaaaatcgggaatgcgaggcgtgtcagatgcctcaggagacgttatcggcacagcatggatcgccgagaccccacttcggtggggtctgtcgagcacaatcattgatgcgagtgatcgcttacgcgatcaggtaggcagagtgcgggtccggccggatggcagcgcgcagcttgcgcacgctggcttccagctcggcatgggcggcatcgagccaggccacgcgatggcgcaccggatccttggccgacaggtcgctggcggcgatctcgcgcaggaagtagcgcaccatgctgccggcgcgcgctggcactggcatcatccccagcagttggtgctttgccagcagccggcggctgactgcatgccgcagccctgcccaggcggtacggcccagcgcgatgtacagcgcatccgtgcgcatctggcgcacggcgcccaggaaccgcgcttcgaatacctcgcgcagcatcggggtctccagcagttcttccagcggtccgtcgaacgccagaccgcgccgcgtggtggcatgcggcagcaaggcaagcggttgcaggcgctcgaacccatcgttccacaatgccgcggcgtgcggcaggccaaccagttcgggcacccggaagtggtcgagcatgcggatcaggttgggccgcaccagcttgccgcccagttcgacgcgccgcttgttctcgcgctggatcacgcggccgggtgcatgggcgcgcatcagttcttcggtgacggcggcggccagccgcacatgggcgtggccgggcgtggtgctgaccagcaccaggggtgcctgggggttcaggtattcgcagggcacgtagtgcatggcgtacgtgccgtcctgtgccaccacaaccggtttggcgatcacgccgactgcgcccgcaagccgaacctgcgcgcaatacgcttcgatgaagttggtcaaggaatccccccgctcgcttcgatgtatcggcgctttctgttggcgccttctacttgttctgctttccgttcatggtaagcctgcggtgcatggcagataaagcgtacggcgccggtttgcccggaaagcgacgaaaccttggtgggccagccaacacaccggggcaggatgcccctcgaacgggtggggcacgcgcctggtccacgccaggtacggtatcgcaccacgtgcgtcaggacgatgacatcgggcaggagggaatcggccggaacggggccgccgcgacggtaggtcgccggaaagaaaagaccggacacgtccgtgtccggtgaacccatttgctgactcaggacgtgtcacagcctgagccatcaaataataacgattatcatttgaggtgacaatagcagcgtgatcttgccagggtgggtcaggcaatcgacgtctggatggaaaactgtcccgacaaggtcttgtgcaccgggcagcgattcgccacgcggagcaggtcatccaggatctggggcgtgagctcgccgctgaccttgacctcccggttcatggtgtaggtcccgttggcatcttcatgaccgaccgatacatggacttcggtgatggcgtagcccttgcgtttggcgtacagctgcaaagtcagcgtggtgcaggcggccagggccgaatccagcaggtcatgcgggttcgggtattgggtgtcgccgccggcggatgcatccaggtcggcttgccactcggcagtcccgttggtcaggtggcagatgctgttgccctggcttggttgccaggtcgcttggatagtcatcaaacgtccccatctataaagagcggcccggtgggccggaacagccattctataagtagcgcccgccgagagctgaagtggcttggagtgcctttttcaggtgggttggctttttttcgaaataccccttgccaaccccgctgcggtcacttaatattcgccccctcgcaacacaacgcagcgctgcaaagcagacgcagcaagggttgcggggtcgaccggaagggttggcgcagcgaagttggcgcgctggccgcagcaaaaaaagatgctgaaacggttgacgaaacgaagaaagctctgcataatctcgtttctctgctgcagacaacgcagcggcgctgaacggcaaagccggcggcgaagttctttaacaaccaaacaaccgataagtgtgggcgctgggtagcggacgccgctgtcttcggacagtgttgcttcacaagttatacagtgctcgcacagcaaaacgtgactggatcttcggatctggtcagtcagttttctgagagtgagcgaccgctcgaaagagcgaggaccttcgggtccacacagagattgaactgaagagtttgatcctggctcagattgaacgctggcggcatgccttacacatgcaagtcgaacggcagcacgggcttcggcctggtggcgagtggcgaacgggtgagtaatacatcggaacgtgccctgtagtgggggataactagtcgaaagattagctaataccgcatacgacctgagggtgaaagcgggggaccgcaaggcctcgcgctacaggagcggccgatgtctgattagctagttggtggggtaaaagcctaccaaggcgacgatcagtagctggtctgagaggacgatcagccacactgggactgagacacggcccagactcctacgggaggcagcagtggggaattttggacaatgggggcaaccctgatccagcaatgccgcgtgtgtgaagaaggccttcgggttgtaaagcacttttgtccggaaagaaatggctctggttaatacccggggtcgatgacggtaccggaagaataagcaccggctaactacgtgccagcagccgcggtaatacgtagggtgcgagcgttaatcggaattactgggcgtaaagcgtgcgcaggcggttttgtaagacaggcgtgaaatccccgagctcaacttgggaatggcgcttgtgactgcaaggctagagtatgtcagaggggggtagaattccacgtgtagcagtgaaatgcgtagagatgtggaggaataccgatggcgaaggcagccccctgggacgtcactgacgctcatgcacgaaagcgtggggagcaaacaggattagataccctggtagtccacgccctaaacgatgtcaactagttgttggggattcatttcttcagtaacgtagctaacgcgtgaagttgaccgcctggggagtacggtcgcaagattaaaactcaaaggaattgacggggacccgcacaagcggtggatgatgtggattaattcgatgcaacgcgaaaaaccttacctacccttgacatgccactaacgaagcagagatgcattaggtgcccgaaagggaaagtggacacaggtgctgcatggctgtcgtcagctcgtgtcgtgagatgttgggttaagtcccgcaacgagcgcaacccttgtctctagttgctacgaaagggcactctagagagactgccggtgacaaaccggaggaaggtggggatgacgtcaagtcctcatggcccttatgggtagggcttcacacgtcatacaatggtgcgtacagagggttgccaacccgcgagggggagctaatcccagaaaacgcatcgtagtccggatcgtagtctgcaactcgactacgtgaagctggaatcgctagtaatcgcggatcagcatgccgcggtgaatacgttcccgggtcttgtacacaccgcccgtcacaccatgggagtgggttttgccagaagtagttagcctaaccgcaaggagggcgattaccacggcagggttcatgactggggtgaagtcgtaacaaggtagccgtatcggaaggtgcggctggatcacctcctttctagaggcttgtgtctcaagcctagcgttcacacttatcggtttgtttgctgttacagccaagggtctgtagctcaggtggttagagcaccgtcttgataaggcgggggtcgtaggttcaagtcctaccagacccaccaagttatccggaagggggattagctcagctgggagagcacctgctttgcaagcagggggtcgtcggttcgatcccgtcatcctccaccactgcctggtaccttggattggttgtcaaatgaaagcgcatcgcgacgatgagtggcgagtgtttccatttggcattgccaagcgatcgcaagatcggctgttctttaaaaatatgggatgtagtaaaggtgtcgcgcgagcgttgatgagacgctgcagtacaagacgcgataccgggttgtgattgtatcaaccaaaatgtatttaagtgatcgaaagatgacttggaatacggcacaaatgcgagaactcatcctgtagcgaggtttcgagcaatcgagacacactcgttatagggtcaagcgaacaagtgcatgtggtggatgccttggcgatcacaggcgatgaaggacgcggtagcctgcgaaaagcttcggggagctggcaaacaagctttgatccggagatgtccgaatggggaaacccggcccgaatgggtcatcccacactgaatccataggtgtgggaagcgaacgcggcgaactgaaacatctaagtagctgcaggaacagaaatcaaccgagattcccaaagtagtggcgaacgaaatgggaagagccttgtactctttagcagtggtgttagcagaacgggatggaaagcccggccctagcaggtgatagccctgtatgcgaaaacacgattgtggaactaggtgtacgacaagtagggcgggacacgtgaaatcctgtctgaagatggggggaccatcctccaaggctaaatactcgtgatcgaccgatagtgaaccagtaccgtgagggaaaggcgaaaagaaccccgggaggggagtgaaatagatcctgaaaccgcatgcatacaaacagtcggagcctcgtaaggggtgacggcgtaccttttgtataatgggtcagcgacttacattcagtggcaagcttaaccgattagggaaggcgtagcgaaagcgagtccgaacagggcgttgagtcgctgggtgtagacccgaaaccagatgatctatccatggccaggttgaaggtgcggtaacacgtactggaggaccgaacccactaacgttgaaaagttaggggatgagctgtggataggggtgaaaggctaaacaaatctggaaatagctggttctctccgaaaactatttaggtagtgcctcgtgtctcaccttcgggggtagagcactgtcatggttggggggtctattgctgattaccccgccatagcaaactccgaataccgaagagtgcaatcacgggagacagacatcgggtgctaacgtccggtgtcaagagggaaacaacccagaccgccagctaaggtccccaaatatagctaagtgggaaacgaagtgggaaggctaaaacagtcaggaggttggcttagaagcagccaccctttaaagaaagcgtaatagctcactgatcgagtcgtcctgcgcggaagatgtaacggggctaagctatataccgaagctgcggacgcacagcaatgtgcgtggtaggagagcgttctgtaagcctgtgaaggtgtcttgtaaaggatgctggaggtatcagaagtgcgaatgctgacatgagtagcgataaagggggtgaaaggccccctcgccgtaagcccaaggtttcctacgcaacgttcatcggcgtagggtgagtcggcccctaaggcgaggcagagatgcgtagctgatgggaagcaggttaatattcctgcaccgtcgtatgatgcgatggggggacggatcgcggaaggttgtccgggtgttggaagtcccggtccctgcattggagaaggcgctcaggcaaatccgggcgcgggattcaaggatgcggggcgagcggcctagtgctgcgaagcaattggaagtggttccaagaaaagcctctaagcttcagtcatacgagaccgtaccgcaaaccgacacaggtgggcgagatgagtattctaaggcgcttgagagaactcgggagaaggaactcggcaaattggtaccgtaacttcgggataaggtacgccctggtagcttgactggcctgcgccagaagggtgaaggggttgcaataaaatggtggctgcgactgtttaataaaaacacagcactctgcaaacacgaaagtggacgtatagggtgtgacgcctgcccggtgccggaagattaaatgatggggtgcaagctcttgattgaagtcccggtaaacggcggccgtaactataacggtcctaaggtagcgaaattccttgtcgggtaagttccgacctgcacgaatggcgtaacgatggccacactgtctcctcccgagactcagcgaagttgaagtgtttgtgatgatgcaatctccccgcggctagacggaaagaccccatgaacctttactgtagctttgcattggactttgaaccgatctgtgtaggataggtgggaggctttgaagcgtggacgctagttcacgtggagccgtccttgaaataccaccctggtttgtttgaggttctaaccttgacccgtgaatccgggtcggggacagtgcatggtaggcagtttgactggggcggtctcctcccaaagtgtaacggaggagttcgaaggtacgcttggtacggtcggacatcgtacctaaagtgcaatggcaaaagcgtgcttaactgcgagaccgacaagtcgagcaggtgcgaaagcaggacatagtgatccggtggttctgaatggaagggccatcgctcaacggataaaaggtactctggggataacaggctgataccgcccaagagttcatatcgacggcggtgtttggcacctcgatgtcggctcatctcatcctggggctgtagccggtcccaagggtatggctgttcgccatttaaagaggtacgtgagctgggtttaaaacgtcgtgagacagtttggtccctatctgccgtgggcgttggaatcttgacgggggctgctcctagtacgagaggaccggagtggacgtaccgctggtgtacctgttgtctcgccagaggcatcgcagggtagctatgtacggaagagataaccgctgaaagcatctaagcgggaaactcgcctgaagatgaggattccctggcggcttgaccgccttgaagggtcgttcgagaccaggacgttgataggctgggtgtggaagcgcagtaatgcgttaagctaaccagtactaattgcccgtaaggcttgatcctataaccagtgtgttttgcctggtgagtcgatcgccttgtgccagatacgcacaaccccaactacatccctattcgcagcgttgacctcaacctcagcgctgcaacccctcatgcctggtgaccatagcgagctggaaccaccccttcccatcccgaacaggtccgtgaaacagctccgcgccgatgatagtgcggattcccgtgtgaaagtaggtcatcgccaggctcttattccgcagaacccccagccccaaaaggctgggggtttttgcttttggcgcggcggaaaatggaatggctcgccgccgccgctccggcgtaatactattaccgctgaatccccattacccatcccatgtcggctgacagcgcctggtacctctatctgctcgaatgcaccggcgattccatctacaccgggatcacgaccgatgttgcccgccgcttcgccgagcatctgtccggaaaaggcgctaaatatacgcgatcgcgcaagcccatacgcgttttgggccaattgcgcttcgacacgaaatccgaagcgttgaaagcggaaatcgagatcaagcgcttgagttcgacacagaagcgcgcattttgcgcgcaactgccagcaaccgagccggcccggtagccggcagtgcgacaaaacaaaaaggccggtatcgcgcaagcgataccggccttttccatgcttgccgatcagaccacagtcagcgtcacgtcgatattgccgcgcgtcgcgttcgagtacgggcacacctggtgcgcctgttcgaccagcttttcggcagcctcgcgctcgaagcccggcagcgagatcttcagttcgacctggatgccgaagccttgagggatcgggccgatgccgaccgcgccttcgatcgtggcatcggcgggcacggtgatcttctgctggccggccacgtagcgcatggcgcccaggaagcaggccgaatagccggcagcaaagagctgttccggattcaggccattgccggcgccacccatttccttgggcacggccagcttggcgtcgagctggccgtcggacgtggtggcacggccgtcacggccgccggtggcggtggcatgggcggtataaacgactttttcgagtttcatctaaggctccggtttgttgcccgagaggggcgtatcaatgcttgccgtcagtccggcaggctggaatcggtccgcgcctgttcaagcgtcgaccgcagtgcatgcaggcgctgcgtcagggcctggatctcttcgaccgggcactgcgtggcgcacaacatctgttcaggaatacgggctgcgcgctggcgcaatgcgcggccggagtcggtcaggctgaccagcacccgccgttcgtcggctgcgtcacgggtgcgcgtgaccagccgcgccgtctccagccgcttcaatagtggcgtcagcgtccccgagtccagcgccagccgcgcgccgaggtccgagaccgtcagcgtttccgcctcccacaacaccagcatcaccaaatattgcggataagtaagtccaagctcacttaagagtggcttgtacaacttggtcatggccagtgagcttgaatacagcgcaaagcacagctggcgatccagtagcagcaaatccggggaggggtcgttgtcgcgttccatggcaatatattagacgcaattagattgtgcgcaagataaattttcatttcgccgaaatgtgctcgatacgcccgtgtatggcctggtgctgacccttaagtctgttttaagtctgggtcgctagcatgaccgtgtcgcgtcgcaaactgccgacgcctgatgcacaaggaaaggaaccacacatgatgcgccagaccattgctcgcacggccgttggtatcgcggcccttgccgcccttggcggcggctatgcctatctgcagagggaagtcatcacgccggggtacgcggcacctgcgccagccgtcgcgccagcgcagccggcggccgccgtggccacgccgacggatttctccggcatcgtggcacagtacgggcccgccgtggtcaatatcagcgtcaccgcgcgcgcccagcgcaccgcggcgcagatgcccccgggcatcgatccggacgatccgctgttccagttcttcaagcgtttcgggccgcagttccagggtccgcaaggcggccagcagcaactggtgcgcggactgggctcgggctttatcgtgagcccggacgggctgatcctgaccaatgcgcacgtcgtcgacggcgcgcaggaggtcacggtcaagctgaccgaccgccgcgagttcaaggccaaggtgctcggcagcgatccgcagaccgacgtggccgtgatccgcatcgacgccaagaacctgccggccgtgcgcctgggcgatccttcgcaggtgcgcgtgggcgagccggtgctggcgatcggttctccctacggcttcgagaacaccgtgaccgcgggcatcgtcagcgccaagtcgcgctcgctgccggacgatacctatgtgccgttcatccagaccgatgttgccgtcaatcccggcaactcgggcgggccgctgttcaaccagcgcggcgaggtggtcggcatcaatgcgcagatctacagccagaccggcggctaccagggcctgtcgttcgcgatcccgatcgacgtggccaccaaggtgcagcagcagctggtggcgcatggcaaggtcacgcgcggtcgtctcggcatcagcgtgcaggaggtgaaccaggcgcttgcacaatcgttcgggctgcccaagcctactggtgcgctggtcaactcggtcgagcccgacagcccggccgcgcgcgctggcctgaagcctggcgacgtcatcgtgcagctcgacaatgacgtgatcgaccattcgggcgacctgcccgagcacgtggccgatatcaagccgggcacgcagacctcgttgaagatcatccgcaagggccagccgatgacgctgtcggtgacggtgggcacggccagggaccgggccgtcgcacagaagggcggtggcagcgaggccggtggccggctggggctggcggtgcgcccgctcacgccggcggagaagcgtggcagcggcatcgacggcggtctggtggtcgaggacgtggccggccccgccgcgcgcgtcggcatccagccgggcgacgtgatcctgtcgctcaacggcacgcccatcagctcgcccgaacagctcaagtcgctggtatcgaaatcgggcaagcaggtggcactgctggtgcagcgcgacgatgcgcgcatcttcattccgctcgacctgggctgattgccgcgggcacgccagactgcccgcaagccgttaactggcaaggctttgctgcccgcgcgggccgtataccccgacgtataccgacacgtatacgaagccggtatacggcccgctaagccttgccggaggcgggattcagcgcaacgaactgcttacagaaagcgcgccagcaggtattatctcgactgcgatgcacgaagcatgcggcggcagcccccgccgaccctggttctgctgaatcgacaaagaggaagtctatgcagttggatttcacccgcgccatcacgccgggtaccgatagagcgcggcgactgacgtccacgacgtccaccgccggctccgcgccgaagccccggcggcgcaagaaggttgtcgccccccactgggagcgcggctatcgctcacacttctaccgcaacgaacgcggcgacaagcttggcgaagtgcgcctgtccgagcgcggcgatatccccgtggtctaccactgggccgccggcaattactctggcgcagaaggctcgctggcccacgcccgtgcgcgcgtggaagagaccatcggtttcggcatgcgccagctctcgctgttctgagcaggtacttcgccggtgccgcatccgccggcactgcgacccgtccgcgccatcgcctcgcgcgcggtgccttcgcttctccccaagattccgcgtctgttccgcagtagttccagtcgtcgcaccgcttgcgcatagccgctcgcgcgggcttcagggcagtcgccgctgcagcagcatgtacgccgccgcccccagcgccagcaccgcaatcagccgatagatatcctcgcaggcaatcagcctggcctgctgctcgatcagcccgttcagttgcgcgagcgcgcccaggtgggcctgcgccgcatcgaagccgcgtgcggccaatgccgcctgcatggcagccatccagtgttcggtctcggcggggcgctggcccaccgcgtgcagcaggctgtcgtgcaccgcgaactggcggttctgcagcagcaccgcacccagcgccgaggcaaaggagccggcgacctgccgcatcaggttcttgctgcggtagccatgggcgaattcatcgggacccagcgcccggaacgtcagcccggcgatggggatgatcaccagcacgccgaacaggcccttgccgaccagcccccatgccagcgccggcgggccggcgtcgggcggcatctgcgagaaccaccatgccgtggcggccatcagcaccaggccggcgaccatcagtggcttcttgcgcgtcaggcgcggcgccacctgcaggtagacgaagatgccggccaggctgaccagcgcggcaaaggtgttgagccagccggtggccgccagcgggatcttcagcgcctgctcggcgtagatcgggaacaggtagccgctcaggttgctgatcatgtagtacacgaagtacatcgccaggccggtcaggtacaccgggtggcgcagtgcgcgcaggtgcagcacgggttcgctgtggtgccactggtgccacaggaacacggccagcagcgccaggcccgcggcggccaccagcgcgagcctcagcgggtgcgagaacacgtcgaagcgcgcctcggtcagcgccgcctgcaaggtcacgatggcggcgccgaacagcagcagcggcccgagcgcggggccgccggtatcggtgcgcggctccgcatccggcagcagcagccaggcacccagcgtggccagcgcggcgaacggcagcacgccgtagaacacgtcctgccatacgccatggtcgatcagctcggcggcgaaggccgggcccagcgccgaccccgagaagatgccgatcatgaaaatgcgggtggcgcgcggacgcgcggtcgggccgaacagcacgttgaccaggatgcggcagctggtgaacagcgcgccgccgcccacaccctggataaagcgcgccaccaccatctgcggcagcgcatggctggttgcggccacgaccgtgcccgccatgaacagcagcagcgcccccgtcaggtagtagcggtagccgaaccggcgcgacagccattgctgcttcaggatcatcagcatgctgcccacggcgtaggccgcctgcaccagcgcgaagctgcgcgggtcggcgtcgaggccgccgacgatatggctggaggcaaacacgaacatgatgttctcgaggaactccaagccggtggccagcgccagcagcatcatcagcagggtctggcgctgccggtggctcagccagcgcagccaccgcatgctgacgcgcaatcgccacagaggctgccagggtgagccgggcttcatggctggagcccctccagggtctggtgcaattgagtcagcgcacgcgtggcgccggccaggccgcctgcgccgagcggcgcccaggcctcgccgtaggcggcatgcaccgcgggcgcggcgcgctccagcagccggcggccggccggggtcagggtcagctccaggctgcgccggtcgctggccgacgcccgccggcgcagcagcccgcgcgcttccaggccgtccagcagccgcgtcatctgcgtgcgcgtggcgtccagcgtggcgcccagctcggacggcatgctgggccggttttcgtcgacggcaagcatgctcagcagcaggtactggctcatgtccagttcgaacggggccagcgcctggtcgatatggccgcgcagcaggcgcgcggtgcgcagcagcagcctggaggccaggatcaggtcgcgcggggcctcgggatggcgggcgcagaagcggtcgatgcgttgttcgaaagacatggctggaggcgttgcgatccacgcgagcggcggatcgattgcattcgatatagttgcagatgtaattatatcaagcgaagctaatcccggcagggcgtgccggccggcgtggctggcgggggcttaatgccgcaacgccgcggcgatctggcgaatgcctgcccgcatcgctgccagcgcctgcgcatggcccgcggccggcaggttgccgtagcgcaagccgacataggcggcgctgacggcagcgatcgcgtcggccgcgcgcggcagccgcgcactggcgcgcgcggcgaagtcttgcggtccttcggcctgggcgcgctcgcagccgtggcgggccagcagggcgcagaagcgggcataggccgcatcgaccgggtctgccggcccgcggcgccgccacagcggcaccagcgccagcaggcacagtgcgcccagcacgccggccagcaactgcccggcgcccacgccggcgccgagtgccagcagcagccgctgctgctgcgcatggtcgtactgcagcacccagcgctgccaggtgtagacgacgccttcataggcccagcgcaggtccttcagccatgccggttgctgcgacggccgccagtccgcggcttcgctgcccactaccgcatccagcccctgttcgatgcggcccggggcaacggcgctggtcgggtccacgcgcacccagccgcggccgtcgagccagacctcggcccaggcatgcgcatcggactggcgcaccacgtagtggttgccgatggggttgtactcaccaccctggtagcccgtgaccacgcgcgcgggcacgccggcggcgcgcatcaagaagacgaagctgctggcgtagtgctcgcagaagccgcgccgggtgtcgaacacgaagctgtcgacctggtcgctgcccagcggcggtgggctcagcgtataggcaaagggcgccgccgcgaacagccgcagcgcggcttgcacgcgcgcgacgggatcggcatggcggtcggcccattgggcggccagcgcgcgggcgcgcggattgccgtccggcaggctcagggccagccggcgcgtggcggctgtcagcgcttcgggcgcgggggacagcgtggaatgcgtgcggtagcggatgcgctggtccaccggccggcgcaccatgaactcgccgtcgggcgtggcggcgccatccacgccggcggacagtgcctggccgcggtccagcgcgaacagccagcgctgctggctgggctcgagcgtgatgctgatgtcgatgccattcgtgttgccggcggcgggcgctggcgccagttgctgccggcgctgccgcgacgggtgccaggtggtgccgtcgtattcccacagcaccagcgcacgccagtacagcgccgcggcgggcagcggcgggccggcgacctcggcacgcagggcgatttcgggagaacggatcagctgcccgacgctgcccggccgcatggtgtcgctgatgccggtggtgccgcgcggcgccgattgcggcagttgccacagcgggtgctccagccgcgggaacagcacgaacagcgccagtgcccacggcagccccagcagcgccatgcgtcccagcagcggccagatcgccagccggctgcgcgcctcggggtggtgcagcaacagccagttgcgcagcacccaggcgccgatcgccaggctgtacagcgccagccagaacggctggtcggacaggtacagcgtcagcagcaggtagaacgacagctgcgtgaccagcgtcgcgtccgacagcgcgcggcattccagcagcttgaggatgacaaaggctcccagcagcgccacggcgagctcgcgccccatgccgccgccgtcctgccacaccagcgcgctggccaccagcagcaccattaccgcggtgatgccgagcatccagcgcgaaggcagcggcgcccgccgccgccatagcagccagcgccagcccagcagcagcaccagcaacaggctgaccgccaccggcagcgtgcgcgcctgcggcgccagcaccagcgccagctggcccagcagcagcccatggtcgtcatgccgcagcggccgcgcgacgggtttcacgcccggtctccggcgcggcaggccgcgggccgttgcggccataacgccagcgcttccaggcaggcgcgccggtggctggcgccgcgcgctggcggcagttctacgccggtcaggcgcaggccgatctcggcatcgtcaccggcggccagcagccacgcgcacaggcgcgacagccgcgcttccgcctccatgccggccgggagtgcgtaccagtccagccagcgcgccggttgctgcggtggatcgccggcgcggctgagccagcggccggtgcgcgcgctgtgcttccaggcgatgcggtgcagcgggtcgccgctgcggtagcggcgcagctggtcgatgccgtcgtcgctggttgccgcgctcgcggccgtgtgcacgccatcgccagcgtctggccgatatgcggcaggcggtggcggggcatcgggctccggggcgggatagaccagcgtcgacatgtccaggtccgcatagctccagacccggaacagcccgaacggaaagcggctggcgatcgccacgcgcggcagcaccagccggccccggcgcgcagtcggcacgtgcagggcgagcatcccgctggcgctgccatcgagcgtcagcatggcggttgccacgtttggcagcgtcggcacgcgcgcctcgatgccgatgcgcgcgtcggcatcgcggttgtcgatgcgcagctggaacacggcatcctgcccggcatgggccggcgccgccgggcccgcggccacggcgaggtcgagcaggttgcggtaggccagccacatacacgccatgccgatgccggccagcaggaaggtcagcgcaaagcccaggctgatgttgtagttcagcgaagtcagcagcatcgccgccagcacgaccgcaaagccgaggccgccgcgggtgggcaggatatagaggtggcgccgatccagcagcagcgtgccgccagttccgccggtcgggcgccggcccgccgtgcggcgctgagccatgaccggcgcgccgcggagcacgcttttgcgcgccgccatggctttcagggaatggccacgccggcctgcagcgcggccagttcgccggcaacggcggcgtggccgcccgcgccggcgggcagcagccgatgcgcggccaccgcggtgaagaccgcctgcacatcttccggcagtaccatgttgcgctgcgccagcagggcccaggcgcgcgcgcaggccagcagcgccagcccggcgcgcggcgacagccccgcggcaaagccgtcgtggctgcgcgtggcctgcaccagcgccagcacgtagtccaccagcgccgggctggcgtacacctgtgtggcagcctcctgcagcgccagcacctggctgccatccatcaccggcggcagctccggcgcgctggcgccgcccaggtacagcacgcgctcgaaggcggggtcggggtagccgagcgacagccgcatggtgaagcggtccaattgcgattcgggcaaggcatgcgtgccgatctgctccagcggattctgcgtggcgatcacgaaaaacggcgacggcagcgcgtgcgtggtgccgtcatgggtcacctgcccctcggccatggcctcgagcagcgcgctctgggtcttgggcggcgcgcggttgatctcgtcggccagcaccacctgcgcgaacaccgggccgcgatggaagcggaattcgccggcgtcgcggacaaagaccgaaaccccgatcaggtcggccggcaacaggtcgctggtgaactgcacgcgctggtattgcagcccgagcgtgcgcgccagcgcatgggccagcgtggtcttgccgacgccgggcacgtcttcgagcagcaggtggccgcgtgccagcatgcaggccagcgccagccgcacctgctgcggcttgccaagaacgatgcggcccagctgggcctgggcctcggccagcgaagcgacgatgcgtgggcgagctgtcacgttgggcctcggcgcaaaaggtggaaaaaacgggtggatgcagggaatatcgggtgaagaccagcgcattgtagcggcgcgggcggcacgcggcaccgtctgtttccgtacggagagtgagtgccccggcgctgtctgcatggttatggtgcagcgcctgcgccagattgcgccggttctggcatcatgagcctgtcgggccaccgcggcccttcccattcctctttccgctgcctgtaccgcgcctgctgcaatgacctcgctggacccctgcgccgacctgccttcctccgtcctgtctgccgatgccggcgcgctgccgcgcctggtgcaggccttccacgccaacggtttcgtgatcctgcgcggctttgccgatgagccggcgtgcgcggcgctggaggcggtgacgcgtgagcacctggccgcggcggtgccgccggtggagttcgaggccgacctgggctatcccggcgcgccggccgcacgcgatgccgccggcggcggcacggtcaggcggctgcgccaggcctacgggcgcgacgaggtcttccgccgctgggccagcgccccgaagctggtggcggtggtgcaggcgctgctgggcgagcccgcccgcatcacgctggcgcaccacaactgcgtgatgaccaagcatccgcactacggcagccagactggctggcaccgcgatacgcgctactggtcgtttgcccggccggaactggtgacggtgtggctggcgctgggcgacgaggacgaacgcaacggcgtgctgcgcgtcatcccgggttcgcaccaggcgaagctggagccgggccagctggacccggccgaattcctgatcgaagcccaccccgccagccagcccctgctggatgccgcgcagccgctggcgctgcaccgcggcgacgtgctgtttttcgacagccggctgttccatgcggccggccgcaatgcctccgacgcggtcaagctgtcagtggcgtttgcgtatttcggggccagcaaccggccgctggacggcacgcgctcggccgagttcggcagcgtggagctgcccgcggcagtctgatccccgcggctgtgctcaggtgcgcagcccgaccagcccggaaatcttctccgaagcttccagcagcggcggcaggaaacgctccagcatctcctgcgcgctggtgcggttggcctggccgctgatattgatggcggcgatggtgtggccggcacggttgcggatcggcgcggccagcgacaccagcccttcttccagttcctggtcgttgagcgcccagccgcgcttgcggatgtcggcgacgatggccttgagcgcgtccacgtcggtgacggtgcggctggtgcgcgcgcgcaggtcggtggcgcgcagcacgctgtcgagctcgggctcggccaggccggccagcagcacccgccccatcgacgagcaataggccggcaggcggctgccgatcgacaggttgatggtcatgatcttgcgcgccggcacgcgcagcacgtagacgatctcggtgccgtccagcactgagatcgagcagctttcatgcacctgctgcgacagcgtctccatgatcggctcggccaggttccagaacggcatcgaggtcaggtaggcgaagcccaggtccaggatcttgggcgtcagccggaacaggcggccgtcggcctgcacgtagcccaaccccaccagcgtcagcaggatgcggcgcgcgccggcacgcgtcaggccgctggcctgggcgatctcggtcagcgtctgggccgggtgctgagcgttgaaggcccggatgaccgacagcccgcgtgcaaaggactgcacatagctgtcgctcggcttttcgggcgtggcggcggcgctgtcggcggtctgcggtgctcgcggcgggttctggcgggaatcggtggggctggccatttgcgtagcccggcgcggttcgccggattggcacggaaaggccgaaagggtagaggaaatggcgggattgcgccagtaccggccccggacatggcctggcgcccggcgcgtgggttccttaccggaagctgcgctgcgccagcacgaacaccgccgccaccacgcacaacacggcaaagccgtgcagcatgtccatgccggccagcagcgtggcctggcggtcgacttccagcgagattttggccagactcgttgccgagagcgcatccggcgcctgcagcaccgggttgtagcgggtgatgtgttccaccaggtgggtgcggtgctgtgccaggccgtcctgcatgaacacgctcgccagccccgtgcccattgccgaggcgatctgcttgcacacgttcttgaactggtaggcgtgcgagaaatcctcgaccggcacttccaggtaagtcatcgatgccacctgcaccatcagcagcaccggcgtcagcccttcaagcagcaccaccggcaccagcgcgtaatccggcgcgcccggcatcagctgctgcgacagcagcatcgccgcgcaggcgtagacgacaaagccgatggcgattacgcgccgcttgcggaacaccagcgccatgcccagcgtaatgacgatggcgccgatgaccgacaccgtgccgctggtcgacaacagcatgcaggtggtgcggaaggtcagccccagcccggtctgcgtgagcgagggcagcaggaacgaccaggccgacgagagcaggtagtacagcgtgtagaagcccagcccgtacaggtactggcgtccggccaggcgcgagaagtcgatccatggatccggatggcgatacagccgccagccgctgaaggcgaacaatgccagcccgcacagcgcggccagcggcatttccagcgagctgaagaagcgcgtgtagcgcatctcctgcagcgtatgcaggaacaccagcgcgcccagcgcggcggcgatggcggcgggccagtccagtgtcgataccggcggatgcgggtcgcgtggcgcgcgggtcgggtaggtcagcgccaccgacagcagtaccggcagcgcaatgccggcctggaacaggaacaccgcgcgccagccgatatcgtccaggaagatgctggtcagccacggcgtgatcgccagcatcgagaacgcgccgccgccgaagcgcagcatcagcgggccgcgctcggccggcgtcgataccagctgcaccaggatgcgcgaggccgcgaacaggccgccggcacccagcccctgcaccgccttgccggtgatcagcccggtggggctggcaaactcggcgcagatcagcgagcccaggacaaataccagcagcgacccgatggtgaagcgcttgtaggtgacgcggcgcgcgacctggtccagcaccatgttcatcagcaccgcggtggccgcgtaggccgagatcgcgtacagataatcttccggcgcggcaccgacgccgccctggatatgctggctggccacgcccatcatcagcgtggacgagaagtcgatgccggtcaccagcccgagcgtcaggccgaacaatgaaagacgccagtgacccatttccgggtgactggcgagttgcatgcgcgggcgctggggaatgggggcggcgggggctagggctgctggaactgcggggcctgaggcgtccggtccagcggggacaggcgtttgttgcatcgctcaagcataatgtaggcctgccgtcgggaactacagcttgtcagggaaacattgtccggtgaacgaaacaatccaatggaatgattgggaggcgttctgctgcgtggtcgagcaggggacgttcacggccgcggcggagcagctggactgccccaagtcgcgtgtctcggccgcagtggcgcggctggaaaccgccatcggcgccaagctgctggagcgcaccacgcggcgcatgcgcctcacggatgctggcaaggcggtctaccgcgatgtcgcccccttgtttgcgcgcctgcgcgagatccgccaggaaacgctggcgcgtgaggagcgcgtacagggcgtgctgcgcatcgccacaccctatgagttcggcgcccagcaactgggtggcgtgatctgccgcacgctggcggcgcatccggcgctggacgtggccgtggaaatcacccagggcctggtcgacccgatccgcgacgggtttgacgtggccttcgtcgtcgtcgacaccgacctgcccgactccggcacggtggcgcgccgcatctaccatgtcgagcgcggcctctttgccgcgccggcgctggcggccagcctgccggcgcagttgcgcccggaagacctggccaatatgccgacgctgaccacgcccggcgacaccgtctgggaattcacccgcgacggccagaccgtgtccgtgccgatccgtccgcgcatgcagacccacaacgccgaactgcggctgcagggcgcgctggctgggctgggcatcgcccggctgtcggtcatttattgcgaggccgagatcgcgcaagggcggctggtgcgcgtgttgcctgactatcctctgccgccgctgcgcgtattcgcgctgctgccggaccggcggctgcagccgcgcaaggtgcgggccttcatggaagcgatcgaatcgatgatggtgtccgagctggagcccgaggcgggcctggacggggggatgggggcggaagcagccgcgagcgggcaggctgaaggagcggcccgcacggcgggttgagggcgctggcgggccgccacggccggggccgtggcaacggaaagggcaggagctcaggcgccgtcggtgaatgcgtcgcggcggtcggtggtcctggcgccgtcagtgaacgggtcggccttgcccagcctggcgccgcccaggaacggatcggccttgccggcgtgggcgatgctcccgtccaggcgggcgatgtcggaaacgggttcggaggcgtgggcagcggccgcggcaaacgacaggctgacggcgcacagcagggaaagcgccaggctgcggcgttgggcgatggtcttcatggtgtgtggtccttctcaggcagggtgcgtggcggaagcgccacgatgcctgcaatgtaggacttcacacggggcagaaaaagggtcaattctcgacacactgtccagggctctggacaatgtgccgagccgccgctggctcagtagtgcatgccgaagatgctggcgcccagccgcgcgatcaccatcagcaggatctgcgcgatcacgaacagcaccagcggcgaaacatcgaagccgcccaggcgcggtaccacgcgctggatcgggcgcagcaccggcgcggtcaggtggtcgatggccggggtgatcggcgaatgcgggttgacccacgacaggatcgccatcagcagcgtgacccacattaccaggctgatcgtccatttcagcacatagagcagggcggtcagcagcatggccggcaggaagccgagcaggtcgatgccgctgagcagcgcgaccagcaccaggaacaccatcgcggtcagccatgcgcccaccaccgtggcccagtcaatgccgcccaccccggggatgacccggcgcagcgggcgcaccagccagtcggtgatctggaacaccccctgggacaccgcattgcgcgtaggcagccgcgtgagctgcatccacacgcgcagcaacagcgccatgccgaacagggtgaagacggtatccagcaggaagagagcgatttccgagaacatcggtgcgttttccggtgacgggtgaaggtgtctgcaaccgcacagattctgccatagcctgacgccggcacgatgcaaccgtgcgccgggcacatgagctggcggacatgtttgtgctggcgcctcggtgcgcggcccctataattgcgtgcgcccggttgcgggaccggccgcgcacccgtggtattgcgcgtggttcctgcgctttcctcctcctttgcgctttttcgccaccttatgcccagcaagtccgccccgtcccggaaatccacatcgcttaccaaggccgacttcgaggcgctctcggatttccgctaccagttgcggcgtttcctgcggttttccgaagatgcggcgcgcgcggaagggctgaccgtgcagcagtacctgctgctgttgcatatccgcggctgtgccgacaaggactgggcctcgatcggcgaactggcggaacggctgcaggccaagcagcacggcgtggtggcgctggtcaaccgctgcgaggcggcggggctggtcaggcgccggctcaaccccgaggaccgccgcgtggtgcaggtacacctgctggccaagggcgagcgctacctgaaccgcctggcgatgctgcaccggaccgagctggaatcgctgcgcggcgctttccgcgtggcccgcatcacccagttcaacgacgacggcgccgagcgcgcctgagccgcggcaggcctgcactgccagccagttacaggcagttaccaatcacaggttccggtgacacccgctggctgccggcggccctagactcgcgcgcattccccaacacgcgcagagcgcaggagtcctgacatgtccatcccccttcgttcggttgtgcttgcggtgcttggcgccggtgcgctggccgggtgtgccacgccgtatggctacgacaacgggtatggcggagggtacggcggcagctatggtggcggctatagcagcagcggctacggcaccagcggctatggcggcagcaccaccatcagcggctacccggcgcagcagggctacccgcaggggtacccgcaacaagggtatccgcaacaggggtatccgcagcaaggctatccccagcagccgtatccgcagcagtcatatccggacggcagctacggcaacaactacggcaaccaggcttacggcgtgcgctacggctgggtcgaggcgatcgaggtggtgcccggccagccgccttcgaccagcggcgcgggcgccgtggtcggcggcatcgtgggcggactgctgggccaccaggtcggcggcggccgcggcaataccgtggccaccatcggcggcgcggttgccggtgcggtggccggcaacgaggtcgagaagcgcaccggatcctcggccgcggcttaccgtgtgcgcgtgcgcaccagcgacaacgcctacctgacgctgacgcagtccaacgcctaccagatgcgcatcggcgaccgcgtcaaggtcgagaacggcgtagccgtgccgtactaagtgccgaacagctgcgcgtagtcctcgcgcagctggcgcttgagcagcttgcccgccgtgttgcgcggcaggtccgcgacgaacacgatgcgcttgggcaccttgaacggtgccagtgcctggcgcgcatgggcgatcagctcttcctcggcggcgtcttcatggccgcgcttgcgcaccacgcaggcggccactgcctcgacccacttcgggtgcggcagtgcgaacaccgctgcctcggccaccgcgccgtgagtgtacagacactcttccacctcgcggctcgataccagcacgccgcctgaattgatcacgtccttgatccggtccaccacgtacaggtagccctcggcatccatatagccgagatcgccggaatggaaccagccgccggtgaaggcttcagcggtcagttcgggcttgtcccagtactccgtcagcagttgcggcgagcgatgcacgatctcgcccagctcgccgggcggcacgtcctgcatggtctcgtcgacgatacgggtctcgacgttcagtaccggccggccggcggaggcggggcgcccggcgtgttcgtcggggcccagcaccgtggccagcggcccgatctcgctctggccgtagcagttgtagaaacgcagtgccggcagcttctgctgcagctcaagcagcaccggcaccggcatgatcgaggccccgtagtaggccttggtcagcgaccccagccgcgccggatcgaagtccgcatggcgcagcagcgcgatccacaccgtgggcggcgcaaagaagctggtgatgccctcggcgtggatggtgcgcaggcaatagccggcctcggggctgtcggcgatcagcgtggtgccgccgcacagcagcagcggcatcaggaagacatgcatctgcgccgagtggtacaggggcagcgcggccagcgagtagtccgattcgcggatatcgcaggcggcaatggtgctgacgtattcggccagcagcgcgcgatgggtcagcacggcacccttgggggccgaggtggtgcccgaggtgtacaggatctgcgcaggcgtggtgtcggtgagcgaatcggacaccggtgccgcggggccgctggcggcggctgccagtacatcgcgcaccttgccgccgtgcagcgtgccgctgaccttgcagggcaggccctcgacgcggtcggccagcgccggatcggcaaagattgcgctggcgcccgactgcgtgacgatgtactcggcctccgcgcgcgtcatcgagaaattgaccggcacatggatcaggccgctgcgcaggcaggccagccacagcagcacataggcgtctgagttcttgccgaaggcggccacgcggtcgccggggcgcaggccccattgcgccagcgcgccggccacgcgggccgcggcctgatccagttggcgataggtccaggcccgttcgccgaagcggatcgcggtcttgcccgggctgcgccgcacggcgcgggcaatggcgtcgggaatggtgttgcgcagggcgcgctgctgctctgactgcatggtgtggtctccattgttatggtgggtccagcaagtcttgaagccaagcgccgaggataaaggctgccgcccggccatggcaaggcggcagcgtctcggggtgggactacagcgcgtcggggtggactacagcgcttccgacaggaacaccagcgcgcgtccgtgggccagcgcggcgctgggctggtggtaggagccgcgcgcccagcagttgaagccgtggtccgcaccctggtagacgtagatctcgctgccgggtttgccggccatggcgtcgcgcacgccttgcacggcctctggcgggatgtgcgcgtcgagcgcgccgtagtggaactgcaccggcacacgaatgttcgccgcctcttgcagctggttctggatgccgccgccgtagtagggcacggccgcatccaccagcccgcgcgccgcgctcaggtacgacagcaggccgccgaagcaatagcccaccgccgccaccttgccggcgccggtgtgctggcgcagcacctgcaccgtggcggcgatatcgtccagcgcggcggtgacatccaccgccttgcgcagcgccatgccgcgcgccatgtcgtcgccttcgtagcccagttgcacgcgtggcgcctggcgccagaacacgtccggcgccagcaccgcatagccgtcggcggcgtactggtccgccacggcgcggatatgctcgttgacgccgaagatctcctgcagcagcacaatgcccggcgcgccgggctgcacgcctgccggcggcaggctcaggtaggcatcgaagctgcccgcggcggtgtcaacgcggatccactggctgtcggggatggctgtcatggggaaaggctctccggagggggctgaacaggaaagctgcaagtttgccactgcgcgccgcttcgtgcagggcagggcgccctgctgctgccgtcagtacgcgcgcgactgctggtagcgcttgttccagttgtcggtgtaggccctgaccacggcggcgtcgccgcggatcagcatgccgttctcggcgttgcgctcctgcgccgacttggtgaagttgaacgatccggtgaagactgcctggtcgtcgaacaccatcaccttgttgtgcgcaatcgcgggtttgttgtcgatcaccaccggcacgccggcatgcttgaggtaggtggcactggtatagcgctcggactgctggctcttgtccaggatcacgcgcacgtccacgccgcgccggtgcgcctgtgccacggcctcggcaatcggtgcgctggtgaacgaataggcctggatcagcaggcgatggcgcgtgctccggatggcattgatcagcagcgcctggcaactcgcgccatcgggcacgaagcacagcgtgtagccgctgccatcggcaaacggcttggccggcaccggcttcgcatccggcggctgggccggcttgccggtgcgcgcgggaaagtggttggcgacggcctcgttgaaggtctcgctgatgctgttggcgatggtgtcggtcacctggtcgaaggtggaagccgagcgggcgtgcgccagtagcgcgaagggactgaacgaggtgaaggccgacacggcggcggccaggcccaggcccagcacggcccggcgaatgaatctgtaagtcacggcggatctttgcgtcggtgaatgacggcatgcgcgcgccgcgcgccgcatgctgtcggggcgggttcgcagcgtagcagccgcatacgccactggcaaagcgtgattgtgtaacaggatctgcggccggctatccggtgcagcatcgctgcaccgccgctgcccttgggactatccgcacccgcgcctatgatggatggaacccccgcgggtccgcccgccaaggagagggatatgagcaaccatacctacaagctggtcgagatcgtcggatcttcacccgatggctgcgaccaggccatccagagcgccattgccaaggccggtgaaaccatcaagaacatcgactggttcgaagtggtggaaacgcgcggccacatcacgaacggcaagatcgcgcactaccaggtcacgctgaagatcggtttccgcgtgagctgagtgcggcgccgcgcttgcgcggcggaattgcgcgacggcacgggctgcgctgcctgtgcggattggtgcgcgtgctcgctccagatgcagccttcgggataaaaaaatcggccgacgcgagactgccgtcggccgggtgcagggaaacctggtgtcgtcagcccaaacgcgaccagctcaatcgaactggtacgaataagtcatgttgatccgcggcgaccgacggcttgcattggtcggcttgtcacctaccggttgtgccaccgacagatccagcgtgtagtagcgccggtccgagaagcgcgcgccaatggctaccgatgacaggctgcggtgcgacagcgacacgctgttggaaaacacgcgcgccacgtcggccgacacatagggctggatggtgcgcaggtaggtcatgtcgggcaggaacaggcggctgatttccgccgaggccccccagcccttgtcgcccgccacttcgccggcgggatagcccagcccgaagaagcgtccgccgaagctgatctgctcgcccgaggccaggcggtcgccgctgtactggcccgccgcggccacggtgaggccgaagcccgccggcaggtctttcgactgcgacagcagcagccgcgtgcggaagaagctcaggtcgttggtgttgttctggcggctcgcacccagcgcatcgaaacccttgtacaggccgagcgtggcgttgcggctcacgccttcgccgcgctgaacgtaggtcagctccgcggtgcccacgcgcacgttggtgcccagcgtcacgcgcgtgccggtggcggtgtgggtgtaccgctcgaactggtcggcgccgtagaagccgccggtcagcgtgagcgtatgcgcgttggacagcagcagcggatagctgagcgagccgccgatgcgcttggtgtcgttgacgtagcgcgggttgaacccgatcgcctccagcgtggcgttctgcggcacgcctcggtagtgcgaggcattgagccgcgcgatcatgccctcggtgccgagcggctgcgcgtagctggcggcgtagtactcctcgttgtcgcggcccttggggaacagtgccgagaccgagatctgctcgcccagcggcgtcagactgttggtggtcgcggtggcaatggcgcgcaggcctggcgacatgtattcaatgccggtgccgaaggtgaacggcttgcgcttgacgtcgagcaccatctcgcaggcgccgtcggtggtggtcggcggctgcaccgtggccgccacctgcagcccgggctgcagggccagtgcattgacgtagtgttcgaagcggtcctggcgcagcgggcggtcctgctgcagcttctcggcaatggcgcgcagccggccctctgccgggcccgccttgcctgtgaccgtcaccttggccacatagccttcgaccacggtgatcagcacatcgccgttggcaaagtcctgcgccggcacgaaggcaaacgagagcggatagccgcggtccttgtacatctgcgtcaccgtgttggccgcttccagcagctgcgccaccgtgatctcgcgattggccagcggcttgaactgcgcggctacctcctcgaacggcagcgtcttcgcgccttcgatgcgaaagcggcgcggtgtcaggcgtgtattgagcaggtcctgcatggccgcctgcggccgttcgacctgcacggtcacgctgctgtcgggccgggccggagcaatcttcgggagcgtctgggttgggtcgccctggaccgggctgcgcggatcggcctggaccaggccgtgatggaacgcgccgacgctgaccagcagcgcggcaacgcgatgacgtgcacgcatggcaaaacccctgtaaggaaatactgcggctattgacgtcgcgtgccactggcgcgggaattgccgctacccccgtgcgcctgccgtccgatgctgccggttcagcgcttggccgctacgttgaatctggtgtgctccgctgcccgcgatcaggcgatcgccagggcagcggctgaggctggattacttctggccgagcgcgccggtcaggccgcccagcaggccgccaaccaggccgccgatggggccggtggcgctggtggtcgaagtcttgctggtggtgctgcccgcggtggaggtggcgccgccggtcacggcggcgacaacattggtgacgggggccagcgggctggtggtgccagtgcccgccgcggcgccggtgacgccgccgaccacgccattcaccacgccgctgaccgcggtggtgaccggcgccagcggcgaaccggtgctgccgccggtggcactgccaaggccgccggtgatgctgctgaccaggctggtgacaggcgccagcggcgaacccgtaccgccagcgcctgcaccgccagtcagccccccggccagcgcagtcacgggtgccagtaccgggctcagcgcgcccaggccgccgccgctggcgggcccgttcactgcgccgcccagcgaagccacggtcgtgccggtggcgttcaccacgccgccgacgcccgagactaccggcgtgttggtctgttgcagcgtggtgccggccgtcgcgagcgcaccgcccacggccgccagcaggctggtggtcggtgcgcccaggcccgtggccgcgccgagcgtctgtgcggcgccggtcagctgcgaggtgatcggcacgatcagcttgctggtggtggtggtcacctgctcgaccgcgccggtcgacagcaccgtggtcagcgtttcgccagtgccgctcaccgttttgcccaactcgttcaccaccgtgcccagcggcgaggtcagcggcgccagtggcgcgagctggccggtgccaaggccactgacggcggtaccggtgctggataaggtcttgccaagttcggtgaccacgttgccggtgctggctaccgtggtgcctaccggattatccgagttcggcatgctgcccaggcccgattgcaggcccgtggccagtgccccgatggcatcgccggcggaggctacggcgtcgcccaggccggtttgtgtctgggtcggcaccagcggcaggttgctgctgccgagcttgtcgccaagatcgctgaccgtcttgccggtactgtcgagcaccttgccagtattgttgatgacctcggcggtcggggtccgtgcggtgggcgtttcgccgccgccggtattgccgccattgttatcgccagtgccacccgtgccgccgcccgtgccaccggtaccgccgccggccacgtcggtgctgccgccggagccacccatgccgccggtgccatcggtacccgtggtcttggtgccgccattggtgcccgccgtgtcgctggtgcccatggaggtcgatccgctgccgctggcgcagccacccagggccagcaaggttgcgaggagtgccgttacggcgagttgttgtttgcgcatgttctgttccctcattcccgtcgtttaaatcgctcggccgcgcatcgcgttcgttttctgcgtgcggcggtgacggatatggcgcaatcggtatgccagcgctgcgacgcgtcctggagcggaccctgcggaagtcgggggtggtgcccgcaaagccttgccgggcgcggattccagggaagcggtgggacctgctcgcggcgctgccggggatggggtgtcagggcggctgcgcgttacgcgttacgtaacgtgtgtcgtctgcagggaacaagacagccggaacggcgggcttgcgacgatggcgatccagccaggcaagcgcgccgtgccgcgcactgccacggcctcccgccacggtcatccgcgcctccgtgttcccatgttcccggaacacgttacgtagcacgtaacacctcaggtccgcgccgcaacggcatttgtgtccggcccgcagctaccccgcatcacccggcaatccgcgccaggcaaggcttgcagcgccgcggccggttccgtgccggcaccgctggcgccgctggcacgcgccttgccattggttgtccagacgcgccgacgatctcgcgttccacggtcttgccgttccgcttcggagcggtccgccagaggaacaaagcgggacaccggggaggctcgtcggcaatcccatgcggcgcacataagacaagacggccggcagcaccgtggccaacaagacaggagaagggcaatgaaaatcaagcatccgtcgcagcatggcatgacctcactggccgcggccggcgtggccgcccttgcgttgctgatggcaggctgttcgtccagcggtggcggcagcggcgccaatccgcggccgaacagcggcaacaccgacacgccggtcaacccggcaccgtccgcatcgagcgagaccacgcccacggccaaggtgaccgaaggcgcgggcaataccgtggtggccactggcaatgccatcagtgacatcggcaagactatccaggaggcgccgctgccgttgctgcccaccacggcgcgcgaaagcgccggcgacgtggtgatcaaggccggcaaggcggttggctcgctcggtgccggcgtgcgcgatgggctggggcagatgggctcggtcgacaacccggttggcgtgacggtggccagcaccggcaacgtggtccacgacgtgggcgaggcgttgatcagcggcggcgacctggtgtctggcctgggcaccgagaagctggcaccgctggcaccggtgaccaccccggtgggtggcctggtcaggcacgtgggcatcgcggtgcacgatggcagctacaagctgaaaagcgtgctgtccgaaggcccggtcgcgcaggtcacgaattcggtcagcaaagtcatcgtgccgctgaccagcaagggcaccgacggcacgcagacactgggagcggccacgcacctgggcgagccggccaacggcctgctctacaaggtcggcaatacggtggctgcaggcggcagcatgatcagcaacacccacgcaccggtggtctcgccgctgggcggcgtggtgactgaggccggcaagacggtcgcggccgctggcgcgctcctcaacggcaatggtcagggtggcggcaacccgcttggtggcctgctgggcaacctgccgctggccaaggctggtagcaacggtgagggcggttccgcgggcggcgcgctcggtcccgtgaccgcgctgctggcgccggtgaccggactggtcggcgggctgaagcaaggcgcacacgacagccagggtggcagcggtgaccacaaggcgttgcagctgccgctggtgggtggcctgctgcgctgaaatgtctcatcccggctaggtgttttcacggtgcgctgtcgctcatcaccccgtcgcagcgcatctttttattttggctggcattgcggccgtatgaccgcaatgccaggttgcaggccggttcccggccggtctgcctgctctttgacaacctgtggacccgggcgtgccgggtcgtttcaaacgcgcgtcttaacccctttgggtcattgctatcacccgtaggaggggtatggttgagacattccatgtcttaaaaagaaagcgcagcaagcgtgaaaagtcgataaaatagcgggccacagagcaccgtgataatcgaacgggggaagcgtgatcgcggcaacagatcacttcgggagtggaaatcatgaaacgactcattgcacgctttattaaggatgagcgcggagcgacggctatcgaatatggcctgatcgtcgggcttgttgctctggcgattgccgtcggcgctggcaaactcggcaccgagcttaacgccagcttcgatcggctttcggtcacggtttcgggatggttcaagtaaagccgaaaccataagaccggcgtgattgccgcgctcctctgcgcggcgaccctctacacagacttcctccaccggcgcgttcccaacgccttgctggcggctgccgtgctggccctcgggctgtcactgctcgccggacagggcatggaactgccgctaaccacgcgcctgatcggcgccgggctgggccttgcggtcacactgccggtatatgccctcgggcagatggcggcgggtgacgtcaagttcctggtcgtggcggggttgttcaccgggccgcaaggactggtactggcatgggtcgtcggcaacctgctcgggctggtgcacgcgctgctggcgcttgcactgggcggtcgcgcgccggctacaagtcaagccatcgatcaccaggacagcggacctattcctacggcgcagttttcgcgggcgcgcggcattccatatgccgcgtacctggccgtgggcgtgctggcctggatggctgcgggccattagccggacaggctagtggcaagcaggctgcgccgccggtcggcgcgaaagaacaccaagggaccggggtttcagatgttgttgcacgcaagggtcaacagggggataaaccggcgccgccacggcgccggcagcgctgcgatcgagtttgcgatcgtggcgccggtgctgctcgccatcgtgatcggcatcgtctactacggtgtgatgctggcgctgcaacaggtgctgacgctggccgccgaagaaggcgcgcgcgctgcgctgcgctatccagcgggcgtttccggctcaggcctcgcggccacgcaaggcgcgcgcgtcgatgcagcggctgcgatggcgcgcggcacgcttcccacatccatcaggaatttgctgtccaccggcaacgttgcgcaggcagtgccctgtgcatccggctccaccgatgtctgcgtgcaggttacgctgaaccttcccaccaccaacatcctccccgccgtgccgatggtcccggtccctgcaacgctgtcaggctcggcaatggtccagctttctcctgatatctgagccgccatgccccaacgcccccacgccatgcccatccaaaggaatcccgcatgaccagcaagcagatccgacttctggcggtggtgctgcttggcctggcgctgctgcttgcgctgctggcgtggcaagtgggccgccagccggcacaggcgcccgcggcatcgacatccgccaaaccgctgcacgcagtggtggtgaccacgcaagcggtggaggcgggcaagccgcttgccgccgaggcgctcaaggtcgagatgctcccgatcgatcccaccggcgcctacagcgaggtggcacgcgtgaccgggcaggtgccgctggtggcgcttggcgccaacgtgccggtgctcgaaagccagttgctggctggcctggccacgcaggtgcgggagggcgaacgcgcggtggccgtgtcagtcgatgaagtcatcggcgtcggcaaccaggtgcagccgggcgactatgtcgatgtcttcctggtgctgcgccgcgaccagcaggagatcccggaaagccaggcgcgcatgctgctgtcgcgcctgcgcgtgctggcctacggcgtcgcctcggtcaaccggccgcagaacgccaagccggaacagatgatggcgcgacaggagggcgccaagaccgcggtgctgtcggtgccgctggagcaggtcagccggctggcgatggcgcagcagtccgggcgcctgctgctggcgctgcgcaatccgcaggacgaagccatgcccagcgacggcatgtttgccgaacccccgcccgcgctggccgcgcgcgccggcgttcccgccgaagcgccgcgcgcggcccccgacaaggccatggccggcgtgatgctgtccggcctggccgcccccgccggcgcctctgccccgcgcgcgccggtggcagcgccggcgccgcggccgctgcaggttgccgcgccgcccgcgccagcccaggcgagacaaagcgcaggcgtggaagtcattcgcgcgggcaagcgcgagatcgaataagaacgtgggcgccgactttatgcatatccagaagaaaccagcccattcgacggccctgcgccgcaggctgatgcaactcgcgctggccgcgatgctggccactaccgcgtggtgcgcactggcgccgcgcgcacaggcgcaggaagccgtgaacgcgcgccagttgcgcctgctggccggcgcgcagaaagagatccgcagcgcgcaaccggtggaacgcgtcgcggtgggcaacccggcggtggccgacgcgctggtgctgcgcacgcgcggtgcccccagcgtgctgctggtggccaagcaacctggcgtgaccgacgtgatggtgtggacgcgcggcggcgccgagccgctgacctacaacgtgcaggtcgatgccatcgcgcccgatgccgatggcgccaagcttggctattccgccgccggtgccaccatcaccgggcagtcgcccgatgcctatgccgcggcgcgcgcgcaggcagcggcgcgcgcggccaccaccggcaagaccgatggcaagcccggcctggtggtggatcgctctaccgtgccgctctccggtaccgtgcaggtcgacgtcaaggtggtggagatcagcaagaccgtgctcaaggaagtcggtatcaacttcttccgcaacaactccggctttgccttcggcacgttctcgccatcgacgctgaacaagttcacctttacgcccggcagcggcggcgcaccgggcagtttcagtgccgacatcgcgtcgccgatgagcaatgccttcaacctggtggccgcgtcgctgacacacggtatcttcgccaatatcagcctgctggaggccaacggcctggcgcgcgtgctggccgagcccagcctggtggcgctgtccggccagagtgccagcttcctggccggcggcgagatcccgatcccggtgccgcaggcgctgggcacgaccacgatccagttcaagccattcggcatcgggctgacggtgtcgcccacggtgctgtcggccgaccgcatcgcgctgaaggtggcgccggaggcgagcgacctcgacccctcgcgcggcatctcgatcaatggcgcggtggtgcccgccatcgtcacgcggcgcgccgacaccacggtggaactgggtgacggcgagagcttcgtgatcggcgggctggtcagccgcaacaccgtcagcaacgtcaacaaggtcccggtgctgggcgacctgccggtgatcggtgccttcttcaagaacctgaatttccaccaggaagaccgtgagctgatgatcgtggtcacgccgcgcctggtgaagccgctggccaagggcgcgccggcggcgcaagccgttggtgccgatggccgcaccaacggcaaccccaatgtatggggctggtatgtgctgggcgaatacgcggacccgactttgccgggtttctcaaaatagccgccggccgtgccggcaggcatggccaacagcttgaggcggagagatggattattttctgttgcacgcaacgcaggacgaagtgaaggactggctgggcaaggtcctgggcgggctgggcacgctggtggccgaaggcggcgcgcaggaagcctttctcgagcgcgtggcccagctgcgcccggggctggtgttcctgcacttctcgacggaactggccggcgcgtcggcgcggctgggcgagcagctgctgcggctcttcccgggcctgccgctggtcgcggtgggccatgccgacgagcccggcatcatgctggcggcgctgcgcgtgggcgtgaaggactttatcgacctgcgcgacgcgccggccgatgccgaggccgtggtcaagcgcctggccgtgccgggcgagcaggtgcgccaggccgagtcggcgcgccagggcaagatcgtggcgctgctgggcgcgcgccccggcgtgggcgtgaccagcctggccgtgaacctggccgcggcggcacgccgccacctgccactgaatgaaaagactgacgcgcgcgccgaagtgctgctgctggacctgggcctgccggcgcgcgacggcgcgctgtacctgaacctgagtccgggcttccactttgtcgaggcggtgcgcaacctgcgccgcttcgaccaggtcttcgtgcagaccgcgctgacacgccacggcaacggcgtatgcgtgctgccgctgcccgcggcgctgggcgagctgcgcgacatctcttactccgaagccatcagcctgctggagcggctgcgcgcgttcttcgacatgcagatcatcgacctgggcggcttcggcaatgccgagttcaccgcgcagatcgtcaaggccgccgacagcgtggtgctggtggccgaccagagcgtgggcgcgatcgtttcggccgcggagctggtgcatgagctgcgcgcgcgcgaggtggagcgcgacgacctgcacctgctggtgtcgcgcttcgatgcgcgcctgggcgtggatgccgcgcagatcgcgcaccgcgtgggtgtgcagtcggtgggcacgctgcccgacagccgcgcaccgctggtgctggccatgaaccgcggcgcggtgctggccgacgacgatccgcacgacccctatgtgcgcgccctggccgacctgctggcacgactgggctaccgcgcggcgcaggccagggaaaccagcctgctggcgcggatgaaggacaaactgcctgaggcgctgcgcgcggtgcgcgtggcacgcactggaacctgacatgacgcaagcgattgaattctccgacaacgcccccgcaccgtttccggtctcgcaggaattccagaacatcaaggaagcggcgcacgagcacctgctgacccgcatcgaagagctcggcgcagagttcggccgctggtcgcgtaccgcgatccagcgctttgtcgacctggaactggagagctttacccggttgcgccgcatccccatcaacgaggccgagctgcgccagattgccgaggcgctgaccaaggagctggccggcttcggcccgatcgaagacctgctcaacgaccccgcggtggaagacatcctggtcaacggccaccttgacgtctacgtgtcgcgccacggcgtgctggagcgcatcccggtgcgctttaccgacagcggccacctgctgcgcatcgtgcgccgcatcctggcgccgatcggcaggcggctggacgagtccaacccgatggtcgatgcgcgcctgcccgacggcggccgcatcaacgtggtgatcccgccgctggcgctggagggtccagtggtgtcgatccgcaagttccgcaaggacccgatgacgcctgctgacctgcaggggctgggcaccatgagccccgagatctgcgacctgctgcaggccgcggtgcaggcgcgctgcaatatcctggtgagcggcggcaccagctcgggcaagacttcgctgctcaatgcgctggccaccttcgtgccgaccaccgagcgcgtcatcaccatcgaggacaccgccgagctggcgctgaaccacccgcacgtggtgcggctggaaagccgtcccggcggtttcgagggcaccggcgtggtgtcgatccgcgacctgctgcgcaacagcctgcgcatgcgcccggaccgcatcatcgtgggtgaagtgcgcggcggcgaggtgctggagatgctccaggcgatgagcaccggccacgatggttcgatgggcaccatccacgccagcagcccgcgcgaatgcctgtaccggctggagatgctggccggctttgccggcttccagggcagcgaggcgagcctgcgccggcagatcgccaacgccatcgactttatcgtgcagatcgcgcggctttccaacggcaagcgccgcatcgtctcgatcaccgagatcaccgggctgggcgacaacatcatttccacccaggagctgtaccgtcacgagccctacgtgaacccggacggtaccgagaccgaccgctggctctcgctcggcctgctgccgcactcgcccaagctggcacgcatgcgcggaccgggcttcatgctggacgaccgcttcgatgtctagcgccacgctgctgctcgccgccacggccctggtcatcaccggcctgggcctgctgctgctggccagcgcgcaggcgcgtgcgcgccgcgagcagcagcaggccttcctgcaggcgcagaccgagcaggtgcgcctgcgctatgcgcaggcgccggatccggcgctgcaactgcccgcacgcgacctgcgccgccgctgggacgacttcctgcggcgtgccgacctggcgccgacgcgccgtaccgccatcgtctggatcacgccggtggtgctgtgcacgctggccggcgcggtggcggggcaatggctgggcgcggtgtcggccctgatcgtggcgctggccgtggcggcgttcgcggcctggaaccgcgtgcgccgcctgcacaagaagctgttgtcgcaactgcccgggttcctggacggcgtggtgcggctgatgacgatcggcagcagcgtgccggcggcgttccagaattcgatcgccaataccgaggcgccgctgcgccaatgcctggtgcaggccgtgcacctgcagcgcgccggcaaggagctggaccaggcggtgctgcaggtcgggcgcgtgtacaaggtcgaggaactggtgctggtggcttccgtgctgcgcctgtcggtgcgctacggcggccgcgccgatgtggtgatggagcgcaccgccgcctttatgcgcgaccgcgaacaggcccagcgcgagctgatggcgctgtcggccgagacccggctgtcggcgtggatcctggggctgctgccgctggtggtggccggcggcctgttcatgctgaacgcgggctacatcttgatgatgtggaaggatcccaccggcaagacgatgctgctgtcggccctggcgctggaaattgccggggccttcatgctgtaccggctggccaagtcgatctgagcggcatgccagcacgcagacaagagccaacatggaccgcctgacactgatttcgctcagcctgctagccgccgcctgcggcgtgggcgtactgacgctgccgctgttgcgcgactggcgccagcgccggctgtcggcgcgcaccatcgacggcgcgctggcgcggcagcgcgcggcagaagccgcccaggccgcccacgccgcagtccccgccgcgtcgggcacccaggctgcggcaaaggccggtgccgccgcgccgcagggcaggggcggggcggctaccgcaatcggggcacaactgggcgcgcgcgtgggcgagcgcatcaatgcccactggctggattcgcgcctcgggcgcgcggtggtgacgccggaagaccagcagttgctggagcaatgtggatggtacgggccgcagtcgcgcatgctgtttggcgtgctgcggctggggttgccgtcggccctggcgctcgccgccatgctctggcacgtgggcgcgggcgcctttgccatcgtcgcgtggggcttcggcacgtttgcgctggcctacctggcccccaagtggcacctgcgccgccgtgccgcggcgcgcctgcgcatggtcgatgacgagctgccggtgctgatcgacatgctgcgcctgctgcagggcgtgggcctgtcgatcgaccagagcctgcaggtgatcgtggccgagttcggcagcatgctgcgcgtgctggggccggagctggcacgcgccaaccagcagtttgcctcgggacgctcgcgcgaacagacgctcttgcgcatcggccggctgttcgacagtgaagacctgaagagcctgatcacgctgctgacgcaggtggacaagcacggcggcgcggtgcaggagccgctgcgccagttcggcctgcgcatgcaggaggcgcgcaaatcgcgcttgaaggatgagatcggccggctcacggtcaagatgaccgcggtgatggtggtgagcctgctgccggtgctgctgatcctgaccgcgggccccggcttcctcggggtgatccgcatgctggcacatatgggagggacgcgatgacgcgctcagtcggtccggcgctgggccggatctcgaaaacggcggcgtgcctgctgctcgcggcgctgtctggctgcgccgccaatcagaacggggccgcggccatgcatgaccaggccgaggcgcaggtggaactggccaagctgcgcgacaagaccgcgcgcgccgaatacagcgagcaggcggtctacctgggcctgatccgcaagatgcagcaggacgggctttacttcgcctcgctggctcatatcgaggtctacgtgaagcgcttcggctccggcccggagatccaggcgatgcgcgccgatgcgctgcgcgagaccgggcaggacaaggccgccaccgatgcttaccagcaacttgcagcgacgtcgcaaggcgagcaggccgcgcatgcgcaccacgggctcggcctgctggcggggcgccaggatgactttgcgcgcgccgttacagagctgcgccaggccgccgcgctcgaccccgtcaatccgcgcatctccggcgacctgggctacgcgctgatgcgcgccggcgcgctgcaggacgcgcgcgtgccggtgatgcaggcgctggaactggacgcgcgcaatccgcgtgtgatcagcaacgccgtggtgtggctgatcgccgacggcaagcgcgcgcaggccaacgccatgatgcaaaaggccgcgctgcccgaagccacgcgcagcgccatccgcaaggaagccgaccgcatcgcccgcgccaccgcggcgcgcgaccgcgcagcggcccgtcctgcgccggcagcgcgggcgccatcgaaacccgccaccaccgcaccggccacctcggtggcggccgtggccgcaaccgcaggggctaccccatgaccgccatgttccgcattgccatccccgcgctctgcctgctgatgctggcgcccgccgcgcaggcgcagaccgaccgtgccacgaccgaggccgctgccaccggcatgccggcaggcagcccggcgcaacgcgagatcggtgccgacacgcgcgccatccttgccatccagcgcgaaggcacgcaggctggccccatgctgccgatgcacggcgagcaggccgcgctgggctatgagcgctacctgaacagcttccgcttcgcgctgccggagttctacacggggcaggccaacgccagcaccgcgcgcgccggctccgccggccagatgctgggcggcaaatgagcttgcgccagccgcggccgcgccgggcacctcgatccgcacgcggcgccatcagtgtgatggcggcgctgctgatcgccaccgtggcgatcgccgcgctggtgtcgatcgacgtggggcatgtgttcatgcgccagcggcagttgcagaacgtggtggacctggccgcgatgtcggcggcacagcaactcaagcgagctgatagcgcggcgaatctgaacgccgctgtgctgggtacggtcaggaatatcggtgcgaagaacgggtatccgtcgggcattgcaatgggttgcggcgatgccaccggtggcggcgcggatgccatgactgcctgtcttggcgtgtgggatccggcgagcggcgggccgaagcatttcagcgctacgtatgaagcaaccaaggtctcgcccaatgccgtgcgcgtgcaggcaacgcagaccgtgccaatcctgttcgtgatcgacggcggcagcggccggcagctgtttgctgaagcgattgccagcggcagtccgccggtggcggcgttttcgctgggtactgggttgctggacgtctccaccgccaacagcatgctgagtgtgttgctgggcaatacggtgagcttgtcgttggtggactggcagggactggtcaataccaccgtgacgctggaccagttgcggctcaaagcgggtgtcggcacggtggaccagctgttgaacacttcattgaatctgcgtgatttctatgcgctggtgcttggcgccgctggccgcgacgcgctgctgacgacgatgctgggcagcccgccaaccgcgctcggggccagcggggcagcggctacggtgtcactggccaggctgcttgatcttggtttgatggcgcctgcggcatcgtcggcggtggaggtgggcctgaacgtggcgcagttgctgctcgcctccgcgcaggtggcgcgaggggatacggcagttgccctgccactgaacatacccaatctcccgcttggcctggggggcatcagcgccaacctgcgcgtgatcgagccgccggtgacggcggcaggtccggcgcgacagctctccagcaacccggacgcctggcaaacgaccgcaagctcatcccaggtaaaactgaccctgatgctccagatcacctcaaatatcctgaaaccggtactggacgccaacttgaacgtgccgctctatctcgatgtggccaacgccaccgccgacctgaccaagctgcaatgcgcggcaaatcctggggaccgccgtgccacgatgcacgtcagaagtggtctcgtcacggcgtgcctcaccgatggctgcacgggtagcgatgtggtgctcggccaggctaagctggggctgttcgacattgcggacgtgattgccacggacgtcccacgctatggcagcacggctggccaggaggtcacgctggcaccgggcgggcatgcgcaagttggtaccgccgatccgtttggcgggttgttctcgcaagtgctggccctgaaggtgcggactaggctgctgggcatccttagtgtgcccattgatctcggcccgctactcgcgccggtcggggcagcgctcgacgcattgatcccgccgctgctcgccagcctcggcatccagctaggcaccgccgacctctgggtccacagcatcgactgcaacaatgccgaactggtgtactgagccatgattgcgccaaaccgcctgatggcagaaatcgaatgaagacagaccgctgggcctacgaaaaccttgaagtctacgtgtgggaaggcaagtacgagatcgccgaccgcgtcacgcgtttcctggcgccgctgggcgtggacgttatccgcgccggcgcactcgaagccttgcctgccgagccgcgcctgaagccctgcatcgcggtgatcagcgtgtcggtgatcggcgcggcgcgcttttcgctggactgggaggccgcgcacggcatgccggtgatctgggtggcaggccccggccgcgaggccgatcccgggcgctttccgccggagtacgcgcatattcttgccgatgacttcaccggcgccgacctgcgcagccagatcggcaagctgctgccgcaactgctggccacggacgcgcccggcgagcgcgaggccgatctggtggccggctcgccggcgatgcgccagttgctgcagcatgtggaaaccttcgccgacttcggcagcaacgtgatgctgtatggcgaaaccggcgcgggcaaggaacgcatcgcgcgcctgttccatgagcgcaatggcacctacggaaaggggccgttcgtcgcggtcaactgcggtgcgatccctgacggcttgttcgagtcgcagttcttcggccatgccaagggcgcgttcaccggcgcctcgttcgcgcaccgtggctatttcgagcaggccaacggcggcacgctgtttctcgatgaaatcggcgacctgccgctgttccagcaggtcaagctgctgcgcgtgctggaagagaacgtgatcacccggctgggatcgaccctggcggtcaagctggatttccggctggtggcggcgaccaacaaggacctgcgcgacgcggtgcgacaggggcgtttccgcgccgacctgttcttccgcctggcggtgatcgagatgcgcatccccagcctggaagagcgtggccaggccgacaaggtggcactgctgcagtccttcctgcgccatatgctgggggaatccggcttcgacgcgctgccgccgatgcctgactggctcaagggcgcggttggcaccgcctatttcaccggcaatgtgcgcgagctgcgcaacctggccgagcgtgtgggcatcacagtgcagcagaccgggcactgggacgaagagcgcatccggccgctgttccgctcgctgcatccgggtgcgttcgatggcggcgagcgcaacgacctgcgtgccgatacggaagagcgccgccgcatcctggccgcgctcgatgccaatggctggcggcggcaggacacggcggcaagcctgggcatcagccgcaaggtgctgtgggaaaagatgcgcaagtaccagatcgccgacagcgaggccgagccggtctgactgcacggctcagaacacgcgcatcaggacacgcctcagggcaggcggatctccttcacgtcgaagtgcgattcgccgatcagctccttgtcgtattcgccgaccagttccaccgtggtctgcgcatccaccggcttctgtgccggccagagcttggccttgatcttcaccttcatctggccggtgccgtccgagaacaggtagcgctcgtcgccgacgctgctgatgatcttgccgcgcagcacggcctgctggtcgtccttgccatctgcctgcagcgccttaacggtcatcaccgggacggccgacgggccggtgtactgggcgctggcgccggcggcggccagtcccagcacaagggtcagggcagtggcggtcaggatgcgtttcatgtgcgttctccgaaaatttcaaatttggggcgactgcatgcatgatgcgcgcgcccgcctgaaccgttgctgaacgggcagtcaggtcgcaacgcattatgatgcgggtttcgcctttgcatctatcggatcccggattgcgtttccttcacaccgccgactggcatctcggccggctcttccatgcgcgcagcctgctggaagaccaggcccatatcctcgaccagtttgtcgaactggtccgcaccgaacgccccgatgccgtgctgatcgccggcgacgtctacgaccgcgccgtgccgccgcctgaagcagtggccttgctcgacgacgtgctgggccgcatcgtcatcgacaccggagtgccggtggtgatgatcgccggcaaccatgacagcgcgcagcggctgggattcggcgcgcggctgatgcgggcgcagggcctgcacgtggccggccgcacgctggccgcggcggcctgcgtgacgctgcacgacacccacggcgaggtgcgcatctacgcgctgccgtacgcggaaccggcggtggtgcgcgatgccatgggcaccgacctgccatcgcatgaagccgcgctgcgcgcgcagctcgatgccatccgcgcggtgcatccgccgggcgtgcgtgccgtggtggtgggccatgccttcgtggtgggcggcgcggcaagcgaatcggaacggccgctgtcggtgggcggcagcggcgcggtggccgcggacctgttcgccggctttgacctggtggcgctgggccacctgcaccggccccagacgctgggcggcgggcgcgttcactatgcgggctcgctgctgaagtattcgctgtcagagtgcgcgcacgacaagtcggtgtcgcgcatcgaactgggcgcggacggcgcggtcgccatcacgccggtgccgctgcaggcgctgcgcgatgtgcgcgtggtcgaaggcgaactggccgcggtgctggcggcgggtgtcgatgatccgcaacgcgatgactacatccacgcgcggctcaccgatacgggcgcgctgctggacccgatggccaggctgcggcaggtctatcccaatgcgctcgcgatcgaacgcacggtgctggcgcgcaccggcacggcttcggaggccgggcgcaagttgcggcaactgggtaccggcgaactctttgccaacttcttccgcgaagtggcggatgccgagctggaaccggaccagcgtgccgtgctcgaccaggtgctgaccgggatcgccgccgcggacagggagtcggcatgagaccgctgcatttgacgctgcaggccttcggtccctttgccgcgaccgagcaggtcgatttcacgcggctgggcgagcaggccttcgtactgatccatggccccaccggcgcgggcaagaccacgctgctcgacgcgatctgctttgcgctgtacggcgatacctccggcggcgagcgcagtgcgcaggccatgcgcagcgccaacgccgcgcccgcgctgcgcaccgaggtgacgctggagttcagcctgggcgcgcagcgctggcgcgtggtgcgctcgccggtacaggagcggcccaagcagcgcggcgagggctgggtgaccgagccggccaaggcccagctggacctgcatgacggcaacgactggatcagcaaggccagccagcccgccagggtcagcgacgccgtgcgcgacttgctgggtttcgacagtgcccagttccgccaggtgatcgtgctgccgcaggggcgcttccgtgaattgctgaccgccagttcgcaggcgcgccaggccattctggagcgcctgttccgcaccgagttgtaccggcgcgtggaagagctgctgaaggccgaggccgccgtcatccgccgcgatgccgagcgcatcaccatccagcgcgacgaagcgctgcgccaggttggggtggaatcggcgcaggcgctggcagagggaatcgaggccttgcaggccgagttgcaggcgctgcaggggcaggaacagggcgcgcgggccacgctggccgcagcgcaggcggcgctgggtgccggcgagcaggtggcggcgcggttgcgggaacgccagcaggcgcaggccgcgcacgcggcgctgctggcgcgccagccagccatggagcatgagcgcgcgcgcctgcacgccgcccagcgcgccgcgcgtgtcaggccggcactgcaggcgtggcaagccgcgcagcgcgaccaggccgccagcgccgttgccttgacgcagtctggcgagcaggcggcgcgcgccgcgcaacaggccacgcaggcggctgccgccttgcaggccgaaaaggcacgcgctgaagcgcgccagtccgcgcagaggcgggtttcgcagctggcagacatgctgccgcgcgcgcagcagctgggtgcgcagctggccgcgctgcaggcggccgaagccaggcaggtggcagccgccactgcgcgcgaacgcgccgccgcacagcttgccacgcggcaagccgatgccgttggcgcggagtccgcgctggcgcaaggccagcttgctgccgcgcaggcacaggccacggcgttgcagctggccgcgttgcaggaacgcgcgcggcagcttgaccgtcatcagcaagctgtccgggcactggatgccgcgaacgcacaggcggccaatgccgccgctgccgaacagcaagccctgcgccagcgcgagcagtgccgcgccgcgctggccgaagcggaagccgcctggcgcgccgggcaggccgcgcggctggccgcaagcctggcagcgggcgatgcctgcccggtctgcggcagcaccgcgcacccggcaccggcgcagcacgtggcggcgccgctgtcggaccaggcgctggagcaggcccgccacgccgcgctcgaggctgaatcccatgcggtgcgctgcaccggccagcaccaggcggcacaagctgccattgcccaggcgcgcgagcggctggacgaactggcgcaggcgctgggcgaggtcggcgacgagtccgcccgcaagctgaaagccgagatcacgggactggaagcggcactggccgaaggccggcaagcggcggcaagccttgcgcaacgcgaagccgccatcgtcagctgccgcacggcgctcgcagcggcggacgccgccagccgcgatgccacggccggcgccgaggccgctgcccaggcgctggcccactgccgtggcgaatggcaggccaacagtgcgcaggttcccgaggattcacgcgaccccgtggcgctgggcgaggccctgcggcaggcgcaggctatgctcgccgcgctggaacaggcgctggtcgctgcgcaggcggccgagcgccaggctgcggcggacgcagccggggcacaggctggactggtctcggcacagcaggcacaggcccaggcgtctaaccgcctggccgaggccgaatccgtgcttgcacaggcgctcgcgcagcaaggctttgccgatgtgccggcccacgcggccgcctgtcttggcgacgatgccatgcaggcgctcgacgcgacgctgcgcgcgttcgatacccagctggccacagccgccgactggcgcgaacgcgccgaggccgccgcgcaagcgctggacgcaccggatctggacggcctgcgcgcagcgcgcgatgcgtcggccgccgcggtggaagccctggtccggcaacaggccgagcgcggccgttcgcgcgacacgctgctgcagtgccagctgcgcctgcagcagctggacgcgcaggggcgcgacatcgaggcacgctacgcggtgctgggccggctggccgaagtcgccaacggcaacaacccgcgccgcatgaccttccagcgcttcgtgctggccacactgctcgatgaggtgctggaagccgcttcggcgcgtttgctggcgatgagccgcggccgctatgtgctgcagcgcgtgcgcgagcaggcagaccagcgcagtgcgggcggactggatatcgaagtgttcgaccacgataccggcgcggcgcgtccggccaatacgctgtcaggtggcgagggcttcctcgcgtcgttgtcgctggcgctggggctggccgacgtggtgcagtcgcgcgccggcggcatccagctcgatacgctgtttgtcgacgaaggctttggcacgctcgatcccgagagcctggactttgccatccgtacgctgctggacctgcagcaggcagggcggctggtggggatcatttcgcacgtcaccgaattgcgtgagcgcatcgacgtgcggttggaggtgcgccctggggttggcggcagccgggtactgttgacgggcgtggcgaccctcgcgtaatgcggcggggtttccccgtcagccgacgaatacctggcggcaacgaatcgccatcacttgcgcttcaaatgcgcgggcggctgcccgggccaggcgcacgcggcgcgacagcgggtgcgggcgggatggcatgttggcgccagccggggcaggcgcgggcgattgcagttgatccttgctgggtttcagtccccacgcctgctgcgtgacatgcaggatgcgcgcaagcgccactgcatggggcgtggatgaaaacgggacatggacggtggccatgacgggctcctcgttctttgttgccaggctgccctgctcagccgggtggtccggtggctgctgtgcgggtgttgccttgcctgattccacaatagcccgtgcgacccccgggccatatcgagtgcgagccgattgtgatgtcggccccgtcctacacacggggtgtgcccgtcacccgcgcgcgctaatcgcacaatctggttagccgaccgcccggtcggcttgaccgtcgccgacgcgcaggtgtaatctgttcattctgcgaattcaagttcgtatatcgaacaaatcggttaacgaacaaccggtccacacccaaagactcacgcagactgctggactcgttcaaatgggtagcgccccgcgcagcccgccgcgacgaaactccttccggcaggattaccggagacagcctttcatgcgccgcgtcttgcggcccgctccggtagcctggcggatcttccgacctggaacgcaagtgatcaacaagctatacgactcggtggaagcggcggtggccggcatccacgacggcgccaccatcctgattggcggcttcggcctcgcaggcatgcccgcggaactgatcgacgcgctgatcgagcaaggcgcgcgcgacctgaccatcgtcaacaacaacgccggcaacggcgacaccgggctggccgcgctgctcaagaccaagcgcgtgcgcaagatcatctgctcgttcccgcgccaggcggattcctacgtcttcgattcgctctaccacgcgggcgagatcgagctggaactggtgccccagggcaacctggccgagcgcatccgcgccgccggtgccggcatcggcggcttcttcacgcgcaccgcctacggcacgccgctggccgagggcaaggaaacgcgcatcatcgacggccagggctatgtgttcgagaccccgatccacgccgacttcgcgctgatcaaggccgacaccgccgaccgctggggcaaccttacctatcgcaagactgcgcgcaatttcggcccgatcatggcgatggccgccaaatgcgccatcgtgcaagtcagccacgtggtggagctgggcgagatggaccccgaacacatcgtgacgccgggcctcttcgtcaagcgcgtcgtcaaggtcgcctgagcgacaggtaacaggagaatccagatgcaacgcctgacccgcgatcagatggccgcccgcgtggccaaagacattcccgacggtgccgtggtcaacctcggcatcggcctgccgacactggtcggcaaccacctgcccgcagacaaggaaatcctgctgcacagcgagaacggcctgcttggcatgggccccgcgcccgcgcccggcgaggaagacggcgacctgatcaatgccggcaagcagccggtgacggtcaagccgggcggctcgttcttccatcacgccgattcgttcgcgatgatgcgtggcggccacctggacttctgcgtgctgggtgcgttccaggtctcagagaagggcgacctggccaactggcacaccggcgcgcccggcgccatccccgccgtgggcggcgcgatggacctggccatcggcgccaagcaggtgttcgtgatgatggagcaccagaccaagcagggcgagagcaagattgtgccgcagtgcacctatccgctgaccggcatcggctgcgtgacccgcatctacactgaccttgcgaccatcgacgtgaccgccgacgggctggtcgcgcgcgacctggtcgaagggctgagcttcgatgaactgcagcgcattaccggcgttcccctgaagctggccgcctgagcgccggcatcaccacacaccaaaacgagagagacacaccatgaccgaagcctttatctgcgacgccatccgcacccccatcggccgctacggcggcagcctgtccgcggtgcgcccggacgacctcggcgcggtgccgctgaaggcgctgatggcccgcaatccgaacctggactggaaggccatcgatgacgtgatctacggcaacgccaaccaggccggcgaagacaaccgcaacgtggcacgcatgtcggcgctgctggcgggcctgccgcaagaggtgccgggcgccaccatcaaccgcctgtgcggctccggcatggacgctaccggcaccgccgcgcgcgccatcaaggccggcgaagccaccctgatgatcgccggcggcgtggaaagcatgagccgtgccccgttcgtgatgggcaaggccaccagcgcgttctcgcgcgatgcgcagatcttcgacaccaccatcggctggcgcttcatcaacccggccatgcgcgcggcctacggcgtggactcgatgcccgagaccgccgagaacgtcgccaccgactacaagatcagccgcgaagaccaggacctgatggcgctgcgcagccaggaaaaggcctcgcgcgcgcaggccgacggcacgctggcgcaggaaataaccccggtcaccatcgcccagaagaagggcgacccgatcgtggtcgagcgcgacgagcacccgcgcgccaccagcatggaagcgctggccaagctgcgcggcgtggtccgtcctgacggcaccgtgaccgctggcaatgcctcgggcgtgaacgacggcgcctgcgcgctgctgctggccagcgaagccggcctcaagcagcacggcctgaccccgcgcgcccgcatcgtcggcatggccaccgccggcgtggcgccgcgcgtgatgggcatcggcccggcaccggcgtcgcagaagctgctcaggcagctgggcatgaccatggaccagatcgacgtgatcgagctgaacgaagcgttcgccgcgcaaggcctggccgtgctgcgtgaactgggcgtggccgacgacgacaagcgcgtcaacccgaacggcggcgcgatcgcgctgggccacccgctgggcatgagcggcgcgcgcctggtgaccaccgcgatgtaccagctgcatcgcaccggtgggcactttgcgctgtgcacgatgtgcattggcgtgggccagggtattgcgatggtgatcgagcgggtctaagtcaagccagttggaaagctgagggtgtactccctctcccgcaagcgggagagggagcgagttagcggtagttcttggagtgagcaagagatgtcccttcccgtagccacgctcgtgaccggcggcagttccggtatcggccgcgccatctgtgaaatgctgctggccgatggcgtgacccaggtggtcaatatcgactatgccgaaccggcctggtcgcacccgaacctgactttcttccaggccgacctgaccgatgccgaggcgacccgcgccgtggccgcgcaggtgacctcgcgcttcgccgtcacgcgcctggtgaacaacgccggcgccacgcgccccggcaccgccgacaccgccaccgtcgccgacctggactacgtgaccgccctgcacctgcaggccacgctgctgctgacgcaggcgtgcctgcccgcgatgcgtgccgccggctttggccgcatcgtcaacatggcctcgcgcgccgcgctgggcaaggccgagcgcgtggtgtactccgccaccaaggccggcctgatcggcatgacccgcacgctcgcgatggagctgggcggcgacggcgtcactgtcaacgccgtggccccgggcccgatcgccaccgagctgttccgcaagagcaaccccgaaggcgccgaacagacccggcgcatcctggccagcatcacggtcaagcgcatgggtacgccggaagacgttgcgcgtgccgcgctgttcttcctgtcgccagacaacggcttcgtcaccggccaggtgctgtacgtgtgcggcggcaccacgctgggcgttgcgccggtgtaagcagcgcgcgtcccaggcatccgcattcaagcattcaacaagaagagacgttaaccaagcgtcacgcatggcggcccgtggccgggccgcccaccggatgcgcgcatgtgcgcgccatccgttcgggaacggcaatcacgccattcagcacaacctcccgcggtacccaatcaccgccggaacgatatagcaccggagcattaccgatgagacaagattcccagacctccaccacgcgccgccgcctgcttgccgctggcgtggcgctggccaccaccatcgccggctttgccggtgcggcccatgcgcagggcggctacccgaccaagccgatcaccatgatcgtgccgttctcggctggcggcaccaccgacatcctggcccgcatcgtcggcctgcagctgggcaaggcgctcggccagccggtggtgatcgacaaccgtccgggcgcgggcggcaatatcggcgcctcgctggcggccaaggcgcctggcgatggctacacgctgttcatgggcaccatcggcacgcacgcgatcaaccagtcgctgtactccaagctgccgtatgacccggtcaaggacttcgcaccgatcacgcgcgtggccatggtgccgaacctggtggtggtgaatcccaaggtgccggtcaacaacgtcaaggaactgatcacctacgtcaaggccaacccggacaagctgtcgtacggctcgtcgggcagcggttcgtcgatgcacctgtcgggcgagctgttcaactccatgaccggcctgcatatccagcacatcccgtacaagggcagcgccccggccgtgaacgacctgctgggcaaccagatcggcctgatgttcgacaacatgccgtcgtcgtacccgcacgtgaaggccggcaagttgcgcgccatcgccgtgacttcggccaagcgctcgccggcgctgcccaacgtgccgaccgtggccgaatcgggcgtgccgggctatgaggccacctcgtggtttgcgctgtacgccaccggcggcacgccgcagcccatcgtcgaccgcctcaacgccgaagtggtgaagatcctggccatgccggaagtgaagaagcagatggccgaccagggtgccgaacccaacccggaaaagccggcccagctggccgcgttcatgaagtcggagacggccaagtgggcgaaggtggtgaaggcttcgggcgctacggtggattgattcacatacaggctgcgccaaagaaaagccggtccctgtcggggaccggctttttgtttatgcgtgggcggggacggctgccactcaatcgctgccaagctacagcttgtttttctgccgcttttcgatcgcagatttgagcagcgccgcactgcgatagatgccgtgtgcgaacttgccatacggcagcgtcgcaaacaacgccatcaccacgccaaggtggaccgccagcagcagcggcatcgccgccgtgccgcgcccggccagcaaccccagtccggtggcgctggtcagcagcagcagcgcgatgaagccgcggtccatcgggcgctgccgggcatccccatgcatcgggtgccggcgcaggttcagccacagcaagccggccgggcccaccagcaggcccacgccgccggcggtgcccagcagcaccggcaggctcgtgaccggatagggcgcatgccagcccagcagatagtggtagccggtcgccaccgctgtcgacgcaaagcacagcatgaaaccgtagaacgtgaaatggtggaagcgccgccgcgccagtgtgaagcggtcgctggcctcgttgcagccatcgccgtggccgccatcgaggtaggtcagtgccagcacgttccgggccgcctctgccacggccggtgccgacgctgtgccggcagagacatcacgccagaagcggcgcacgcccaggccaagcgcaagcacggcaaagccgaacacactgccgaacaatgccgccagcgtgttgtgcgggaataccgcgtagaaattgccgccctcatgcgtctgccacagcgcgccgcccagcgtggcggcgagtaccaggaacaacgccagcccgaaggccagcgccaccgacaccgtcagcccgttgcgctggtacagcttgcccagcggcgcgggccatgcatattcgctataggtttccagccgcacctttgccatggcctgcggcacattgacgccgaaatcatgcggcggcgcgtactggcaggcgtggtagcaggcgccgcagttgtggcacaggttggccaggtagttgacgtcggccttgccgaactccagccggcgggtcatggccgggaacaccgcgcagaagccttcgcagtagcggcaggcattgcagatctgcatctgccgggcaacttcggcctcattgtcggtcagcggcagcacgcggatgacgcgggactgcggcgccggggcggcagcgtcctgcccggccagttgcgcggcctcgcgcgtcagggcttcaagcttctgcatggatggctcccgtgttgatgcccgccgccaatgcagcctgcgtgcccgcgatgcgcccgaaggccgtgccgatcgacatgccgacaccggccgtgtatcccttgccgagcacgttgccggccatcatttctcctgccacgaacagattcccgcttggcttgccgccaaagtgcatctgggcgcggtcgttgaccttgagccccaggtaagtgaaggtgatgcccggccgcagcgcgtagccatagaacggcgcctggtcgagcggcctggcccaatgcgtcttggctggtgccaggccttcggtgtggcagtcgtccagcgcggtatggtcgaagctgccgacgcggcacgccgcgttgtagtcctgcaccgtgcgcacgaactgcgcttccggcagcccgagcttgcgcgcgagctcaggcagcgtgtcggccttctcgccgggaaacaccggcggcatgaagcggccgatggccttgctgtcgatgatcgaatagccgatctgcccgggctgctgcgccaccagccggccccagatggcgtagcgcttgggccagaagtcctcgccctcgtcgtagaagcgcacggcgtcgcgattgaccacgacgcccagcgacacgcaatcgatgcgcgtgcagatgccgccgtcgtacagcggcgcgcgcgcgtcgatggcgacacagtgcgattgcgacgggtcgccgatggcatcggcgcccgcgtcgatcatgtaacgcagcagcacgccctggttgaagcgcgtgccgcggatcaggaagttgtcggcgggccattctccacgttcattccggccccaggcttcgcgcagccattcgcggttggattcgaagccgcccgcggccagcacgcaggcgcgcgcggtgaagcgctggctgccgctgcgcgcggcgacgaagcggtcgccatccagctcgatcgcatccaccggggtttcatagcggacctgcacccccatcgcttcggcgctgcggtagtacgcgttgaccagagccttgccgccacccatgaagaaggcgttggtgcgcgccacgtgcagcgcacccgacagcggcggctggaagcgcacgccatgcctgcgcatccacggccggcaggtcgatgacgcgcggatcaccagccgcgccaggtgttcgtcggtgatgccgccggtgaccttgagcaggtcctgccagtactcttcctcgggataggcatcgaccagcacgtcctgcggcgcgtcgtgcatgcagcgcaggttgcgcgtgtgctgggagttgccgccgcgccaggcgcgcggcgcggattcgagcagcagcaccgaggccccggcttcgcgcgccatcagcgccgcgcacagggccgcgttgccgccgccaattaccaatacgtcgaccatggggattgtctccttgctggcgccatcttggcgcgcaaggcgggcgggcgccagcaggggcgcggcaagggggcttcagctttcgtgaagcccggccggggcacagccggctcagcgcgggcgcaacgtggcgccgggccagcgcccctcgcgcaccagcgtggtggcgacgtcggccagcaccacgcgcgcggccaggcccgccggcgacagttcatcgtcggacaggctgaccagcaggttgggccgcgtggcgccggcgtcggtgaccagtatgctgcggtagggcgtgccgtggctgcgcgccagtgccgcgcccggctggatggtggcgcccaggccaccgcgcacggcgtccatcaggatcgccagcccgtcgatctccgccaccacctggggttcgcgcttcgcctggcgaaagcacgcggcgaccagcgcgcgcagcccgtgcgagccgctgggcaggatcagcggcagcttgccaagtgccgccaccgaggtctgctcgccgcgcggcatgccggccagcccctcggcgccgatcacgaacagccgctcatcgagcagcggcagcacgctccagcgctgcgcgggctcctcgctgaacagcaccgccaggtcgatctggcgcgcgctcagcatcgtgccgaggtagccggacaggctctccaccatgcgcagtcgcacgtcggggtagcgctcgcgcatggcctgcatgaagggcagcgccagcaccgcggcggtgctgggcggcaggcccacgctgacatggcccgacaggcgcgcctgccgcgcggccagcgcggcatcgtcgatatggcgcagcgccagctgggcctggcgccagaaggccagcccggcgtcggtggcgaccacgccggtggaagtgcgctgcagcagccgcgtcgacagctcgctctccagccggctgatctgctggctcagcgcggacgtgaccacgcccagctccagcgccgccttgcccatgctgccgtgctcgatcacgctgacgaagtagcgcagttgcctcagttccatgtcgtgtccccgctgccgcaatttgcccgcatggtagcggaaaacctgccgcagttcacgaatcctgaagacccgttaacgcccgcccgatggcgcgcttgccagcggctgcgtagagtcgcaccggtcagaaaccggcggaagcgacactacgcagccgccattccataacaacatgacttcccgcaaaggagactgcatgacaaccgttttgcgcatgcgccgcgccgtgatggccggcctcgccggtaccgctgtgctgggcgcgcccgccgcgttcgccgcggacaactggccggccaagccgatcaccctggtagtgcccttcgccagcggcggcaccaccgacatcctcgcccgcaccatcggccagaagctgggcgaggcgctgcagcagccggtggtggtggataaccgccccggcgccggcggcaccctcggcgcggccaacgtggcgcgcgcgccggccgacggctacaccttcctgctggccaccgtcgcccacaccatggcgccggccatctacaagagcctgccctacgagttcacgcgcgatctcgatccggtgggcctggtggcgctgacgcccaatgtgctggtggtcaatcctgcgatcccggtgaagtccgtgtccgacctggtcgcctatatcaaggcgcatcccggcaaggtcaactacggctcggccggcatcggcagcaccgagcacctgtccggcgagttgttccgcgcgctgaccggcaccgacgttgcgcatgtgccgtataagggcggcgcgccgatgatgaccgacctgatcgcgggccagatccagatggcgatcgaaaccagcccgtcggcgtcgcagcacgtgcgcagcggcaaggtccgggcgctggcggtcaccaccgcgaagcgttccgccgcctatcccggcgtgccgacgctggcggagagcggcgtcaggggctacgaagtcaccacatggttcgcgctgatggcgccgcgcggcacgcccgcggcgatcgagcagcgcgtctcggcggagctgggcaagctgctgaaggcgccggaggtgcagaagcggtttgacgagcagggcgtgaccgctggtgacatgacgccaacgcagcttgctgcctttatccgcgccgagaccgacaagtggggcaaggtggcgcgggaatcgggggcgaaggcggagtaacggcctcgctcacaagggcggcgctggcgttacaggaggagatcgcgcgggagcggccgcggcagccgaccggctgccagaacgggggctgaacaccccttgccggcaacagtccaatggatgtcgccagcctgaatacggaggaacccaaaatgcatgacctttccttcgttcacgctgacgcggcccacgtcgaatggcaggtcgcgctggcagactgccagcgccagctggacacgcaggatttcctgcgccaggcgaaggcagacaacgcgccgccgctcacgctcggctggtgctacctgagcgactactacgcgctggccgccgaggccatccttgccgcgctgcagcagaactggcccggtgtgtcctgggtcggcacggtcggcctgggcgtatccgccagcggcaaagagtatttcgacgagccggccatggtgctgatggcggcgccgtttccgcgcgacgcgttccagctgttttcggggcgccagcccttgccgcccgcgtcttccggcttcgttccgcataccgcgctggtgcatgccgagggcagtacgcccgatgtgcaggacctgttgcatgagctgagcgcgcgcacggccaccggttacctgttcggcggcttgtcgtcggcccgcaaccgtaccttgcatattgccgatggcgtgttttccggtggactgtcgggcgtgctgttcggccccgaaatcgaactggtctcccgcgtcacgcagggctgccagccgatcgggccggtgcgcgccgtcacgcgcagcaatcacaacctcctgttcgagctggacggcaagccggccctggattgcatcctgaatgacctcggcgtcgagcgcgatgcccaggtggaaaccatggcggaggcgctggccggaacgctggccggcctgaattcagccgccgacgatgccccggtgctgcccggcaggttcggctcggacacgctggtgcgccacctgatcggcctggacgtgcagcatcgcatgctggcgctggccgacatggtcgagcccggcatgcggctggctttctgcatgcgcaatgctgacgcggcgcgcgcggacctggtgcgcgtcgccaccgagatccgtacggagatcgaacgcggcggcagccgcgcacgtggcgcgctctacatcagttgctcaggccggggcgggccgcatttcggcgcgccgcatgccgagctgcagaccgtacgccgcgcgcttggcgacctgccgctggctggcttctttgccggcggcgagatcgcaagggatcacctctatggctatacgggggtgctgacggtattcaccggccattgaatccgcgaatgacagcatcgatgttgcgcatctggcgcgcaaaccagatgcgcaacaggctgttcgacaggaccatcggcagcgaatacgcaatgatccgatacaccttgccgcgctgcagtctggacgcctttgccgggtccagccagtcgtcgttgcgcaccagcagcaacagcgtttccatgccgataaggacgggccacaggcaagccagccgcagccggataaaacgcgggtgaatggcaagcgtgtacgtcatggcctcgcaaaagtggtccagcgtcttgcgcacgagctcgagcatcaaggcccgcgcgcgcggcgaggcgtccgcaagcagcagatcctgcgggctcaggccatgctggtgcagcatcgtcgccggaagatagcagcggccgatgcgcaggtccttgccgcagtcccgcagcacattggtcatctgcaaggctttgccgaagcggaccccgcggcgcagcatggcgtcgggcttgccgatcgcgccaggcatgtgcgcggcggtcatgctggtccagaactcgcccacgcatccggcgaccaggtacgtataacggtcaagctcttccggctcgcgcagtgcgacgatgcggccggcgttttcatcggggaaggtgcgcaggtcaaattccatgccctcgctcagggtcgatacgatctgccgtaccgcttgccggtcgtccggctccagctgcgccagcaccgccagcgcagggcccagtgactcgagcaggatgcgctcgtccgactgttgttcctgccggcctgccacctcggttgcgatgctgtcggccagcgccgtgtctgcggttgcaccgttgacctggtcgcgcaacgacaacagcagcgccaggcgccgttgtggcgggatcagcgaggtatcggcaatcgtgtcggcggcacgcgccagcagataggccaggccgaccggatcgcgcatccgctcgggcagcacgcgcagcgtgagatagaacgaacgcgagacgcctttgagcagcggaccgaggagaaacgcccggctgggttcgcgcatgggtggtgtcctgttccctgggaggttggcgaaagtgacaatgcccgggtggccgtcaggccgggcccgggcattgtaccttcgacgccaggggcagattgctggcactgttcagggcgagtccttgccgagatagcgctcgaaccactgcgccgccaggcgagcgaccgattccagtgcgccgggttcctcgaacaaatgcgaggcgccgggcacgatcaccagcttcttggtgcatgtcagctgggcataggccgattcattgcgttccaggacgctcaggtccagcccgccgatgatcagcatggtgggcgcaagcagtttcgcaagggcgtcggggcccgccaggtcgacccggcccccgcgcgaaacgacggcgtgtatcgggatagacgactggcatgcggcacggatcgacgcggcgccaccaacgctggcgccgaagtagccgaaccgctgtggcacggcttgctgccgcgccacccagctggttgcctgcgccagccgtgtcgccaggagctcgacgtcgaagcggatggcctgcacctggtcttcatccggcagcagcaggtccatcagcagcgttgccatgccgcagcgattgagctccgcggccacatatcgattgcgcgggctaagccgggaactgcccgtgccgtgcgcaaacaataccaatgcgaccgcgccgggcggcaacgtgagtatgccttgcaggtccacgccgccggccgggatcacaacctcgatggcttctgaattgctcggcatggcgcagtcctccgacgggtggtgcgtagacgtgcatcgcgttgcaatcgcgcccatccaagtccactatagggcgggcgtggcggcggggccagtcgccgtgtgcaggtctcctggcgcacgcaatcgacaaccatccctttggatcaggaggaaacatgaagaccctgtttctcgtccggcatgccaagtcaagtaaagatgatccctccttgcccgaccgtgagcgccccctgaatgaccgtggcctgcaagacgccccggaaatgggcaagcgcctggccgagcgtaagctgaagcccgacctgctcctgtcgagtccggccctacgtgcgctgacgacagcgcaactgatcgccgacgagctcggctatgcacgcaaggacatcgcgctcgatgaccagctgtacgccaccagcgcggagcagttgctggccgtcgttcgtgcgctcgacaagaagctcgattgcgtgatgctgttcggtcacaaccccgagttcaccgacttcgcgcatcgcttgtcggacgagattaccgacatgccgacctgcgccgtcgccagattcagcttcgacaccagggcgtgggaggatgtcggcgaaatcaccccgtcgaaagtcacgctggaatcgccgaagaagtaatccgatgccggccgccttcagcgtggcagtgatatatccggcttgaccatacggggcgaagcgataagaatttgtgatcgcaggcgaaagcctgccctcacgcttctctacgcttggtcccacccatgatcccacccgtcagcaccctccacggccgcctgaaaatgcagcacctgcgcctgctgctggcggtggaggagcgcggttcgctgcgccaggccgccgaggcgctgacgctgacgcagcccgcggtcagcaagatgctgcaggacatggaggacctgctcggcgtgccgctgttcgagcgccatgcgcgcgggctgcggcccacgcgcttcggtctggcggccacgcgctatgcccggctggtgtttgccgacatgggcgggctgcgcgatgaactggtggcgctggagtccggcaagatcggacgcgtgcgggtcggggcggtgatggcgcctacaccggggctgcttgccgacgtgatccggcagctcaatcgcgatcatccgcggctggaggtggcggtgcacgtggagaccagcgatgtgctgatgccgcagcttgagcgcgaccagctcgatatcgtgctggggcgcgtgccggatggctgggacagcagcgggctggacttcgagcaactgggcgacgagggcctggctatcgtggtcgggccgcagcacccgctggcgcggcgccgcaagctgtcgttcgaggaactgacgggctacccgtggatcatgcagccgcgccccagcccgatgcgcgcgctgatcgaccgctcgttcgaggatgccggcgtgccggcgccgccgtcgaccatcgagaccgcggcggtgctgatgaccacgtcgttgctggcggacagcgaactgatcgcggtgctgccggagtcggtcgccgcctactacggcaggcttggcgcgctggcggtattgccgctgcccctgccgcgcaagctggggccctatggcatcgtcacgcggcggggccgcccgccgacggcatcgatgagcctgctgatcgatgcgttgcgggcattgtcgaggtgagcctcagccgggcatcccttgcagcttgccgtcgaggcgccacgcgtggcgttgcgggctgtccgggcgcagcgacgcgggcagcaggccgggcggcatgtcctggtagctgaccgggcgcaggaagcgcgcgatggccaggctgccgaccgaggtgctgcggccgtcggacgtcgccggccacggcccgccatgcaccatcgcatgtccgacctccacgcccgtgccgaagccattgaccaggatgcgtcccgccaggcgttccagcgctggcaggaaggtgcgggcggcgtcgtggtcggcatcctcgatatggagcgcggcggtcagctgcccctccagcgcgtcgatgacgcgccgcatctcggtgaggtcgcggcagcgcaccaccagcgaggcggcgccgaagacttcgtggcgcagcgcttcgttggccaggaagacatcggcgtcggtggcgaacagcgcggcctgtccctgcgcagccgatcccgccgcgccgcgcgcaacggtctgcacttgcgcatggctggcgagcgtatcgacgccggcgcaataggcacgatggatgccgggcgtcagcatggtcgcagccggcagcgcccccagccgcgcagccgcggcctgcaggaagcgctccaggtcatcccccgcaaccgccagcaccaggccggggttggtgcagaactgcccggagcccagcgtcagcgaatccgcgaacgccgtgccgatggcttcggcgcgattggccagtgcgtgcgggaacagcagcaccgggttgatgctgctcatctcggcaaacacggggatcggttctgaccgtgccgccgcgatcgccatcagcgccatgccgccggcgcgtgagccagtgaagccgacggccttgatgcgcggatcggccaccagcccttggccgacctccagcccggcatcgaacagcagcgagaaagtcccttcgggcaggtccatgtcgtcgacggccttgcgaatggcgcggccgaccagctccgatgtgcccgggtgcgccggatgcgccttgacgacgaccgggcagcccgcggccagggccgaggcggtatcgccgccggccaccgagaatgccagcgggaagttgctggcgccgaatactgctaccggccccagcgcgatatggcgcaggcgcaggtcgacgcgcggcagcggcttgcgttcaggtagcgcggggtcgacgcgcagttcaaggaagtcgccctggcgcagcaggcttgcgaacatgcgcaactgccccacggtgcggccgcgctcgccttcgatgcgcgcgcgcggcaggccggattcggtggtgcagcggtcgatcagggtattgcccagcgccaggatgttggcggcgatggcttcgaggaaatcggcgcgccgctcgggcgtggtctcgcggtaggcgtcgaatgcctgccatgccagcgcgcaggcctggtcgagctgcgcgggcgtggcgccgccgaatgccggttcgagggtggctccggtggcagcgtcgatggcgtggatggtgccgttgccgccgcgttccgcgcggcggccgatcaggagttcgcctgagattgtcatgccttgtcctttcgatgagatcagcgggcccagcgcagcaccagcggatcgagccggcgcgcaatcttcagcagcccttcgcgggtggccgggtgcatcggctgcagcggatgacgcaccgcgtccgatgcgatcacgccgcctgcctgcatcagcaccttgctggtggccagccagccttgccggttttcatagttgatcagcggcagccattgctggtagcgctgcgcggccagttcggcgtcgccggcctgccacgcatcgaggatctggcggatgccgtcggggaagcccgcgccggtcatggcgccggtggcgcccgcttccaggtcggccatcagcgtgatggcctcttcgccgtcccaggggccgacgatggcgtcgccgcccagttcgatcagttcgcgcagcttggccgcggcctgcggcacttcgatcttgaagtacgacacattgccgatctcgcgcgccatgcgcgccaggaacggcgcgctcagggtggtgccgctgaccggcgcgtcctggatcatgatgggaatgtcgatggcatccgagaccgtggcgaagaactcgtaaatgctgcgctcgggcacgcggatggtggcgccgtggtaaggcggcatcaccatcaccatggccgcgcccgcatcctgcgccgcgcggctgcgctcggcgcacaggcgcgagctgaaatgcgtggtggtgacgatcaccggcacgcggccgtccacgtgttccagcacggtcttcatcagcacgttgcgctcgtcgtcgctcagcacgaactgttcggagaagttggccaggatgcagatgccgtgcgaacccgcatcgatcatgaagtcgatgcagcggcgctggccgtcgaggtcgaggccgccctgcgcgtcgaagacggtgggcgctaccgggaatacgccgcggtagacggtgggggatggggtgcgggtcatggactcctccggctgcttgtgaattggatcgggccaatatacgagccgccatccgggctgtatattgaaacctttccatctggtgatcgcttttgcgactcacagatttcttcatgaaatccaccctcgacgccctgaccggccggttgcgcatgaagcagctgcaactgctgatcgcgctggacgagcattcctccctgcaccaggccgccgcggcgatggcgatgacccagtcggcggccagcaagtcgctgcaggagctggaaggcatgctggaagcgccgctgttcgagcgctccaggcgcggcatgcgtcccaatgccttcggccattgcgtaatccggcacgcacgccagctggtggccgacctgggcgccatgtgcgaggaggtagcgggcatccgcgcgggcagcggcgggcgcgtggccatcggcgtgatcatgggggcggtgccggaggtgctggtgccggtgctggcgcggctgcgccaggcgcagccggagctggcgctggagatcatcgaggacaccagcctgcgcctgctggggctgctcgacgacggccacctcgacctggtgatcggccgctcgctggtcagcgatgaaccggcccgctaccactaccacccgctgggcgatgagcaggtcgcggtcgtggtgggccatgcgcatccggcaccgcgcgcgcgcgcgatggggtttgccgacctcgcaggttatcgctggatcacctatgcaggccatatgccgatgcacgcgctgctgcagcgcgagctggacctggccggcatgagctttcccgccaatgcgatctcgacctcgtcggccttcgtcacggtggccatgctgcagggcgaccccgggctggtgtcgctgctgccgaccggcgtggcggcgatgttcgtgcgccagaagatgctgcgcatcctgcccgtgcggctgcagtcgcggcagcagacttttggcatcgtgacgcggcgcggcggcgccttgtccgcggcggcgcgacagctggtcgcgatcctgaaggcattgccgcgcactgcgcagcaggcggctgccgaggtataacgccaggtgatcgccagttcaaaaaacatcagtagtggcgaatcactgatgctcctatagtctgcccatccgcgccgcagagccggacagcaaaacgacggagacagcaatgaagacatggatcgccggcgcactcgccggcctggccacggtggcggcagtaacgggcaatgcctgggcgcaggacacacggccggtgcggctgatggtgggtgcagcgcccggcggcggcaccgacgtgatggcgcgcatcgtctccgacaagctcgccgcgcagctgaagcagccagtcgtggtcgacaaccgccccggcgcgtccaacaccattgccgcggatttgaccgccaaggcggcgccggacggcaatacgctgctgatgggcgtggtgacctcgcaagcgatcgcgccgcacctgctcaagctgcagttcgatccgctcaaggacctggcgccggtggcgctggtgtcgtcggtgcccaatgtgctggtggtcaacaaccaggtgcaggcgcgcgacgtcaaggcgctggtggcgcagatccaggccaacccggacaagttccgctacagctcgtccggggtcggcagcacccagcacctggccggcgcgtccttcgcgcggcagatcaagggcaagctgctgcacgtgccgtacaagagcagcagcagcgcgctggtggacctgatgggcgggcaggtggacatgagcttcgagaccatgccgtcggtcatcagccatatcaaggccggcaagctgcgcgcgctggcggtcaccgcggaccagcgctcggcgctgctgcccaacgtgcccacgctggctgaagcgggcgtgcccggcatccagatgagtgcatggtacggtgtctatgcgccggccggcacggcgcccacgacactgcagaagctgggcaacgcgctggccacggtgatcagggaccctgacaccgtgcgccggctggccgatgtgggcgcggtgcccggcgcgctgaccgcggcgcagttcgatgccttctcgcgtgccgagtatgtgcgctatggcaagctgatcgctgaactgggcgtcaagctcgaccaataacaaccccggaagtccaatgaattcccgtccaagaatcgccatggtgctgggcgaccccgccggcatcggccccgaactgatcgccaggctgctggccgaccccgcgaccgccgtgcaggccgagatcctgttgatcgccgaccgcgacgaatggcgccacggcatgcggatcgcaggcgtcgagctggcgctggccgagaccgatgcgcccgcctttgccgacgatggcaagccgcgcctgtaccactggcagctgccggagcgcccggcgtatgcgcgcggccaagccagtgccgagggcgggcgctacagcctgggcacgctggcgctggcactgcagctggcgcaagcgggccaggccgacgcgatcctgttcgggccgctcaacaagagctcgctgcacgccgccggcatggcgcacagcgatgagctgcactggtttgccgagcagcttggctgccacggcaacttctgcgagttcaatgtcctggacgggctgtggacctcgcgcgtgacctcgcacgtggcgctcaaggacgtgccggcgatgatcacgcaggaacgcgtgggcggcgccatcgacctgattgaccaggccctgcgccgcgccggcatggcgcgcccgcgcatcgcggtgtgcggcctgaacccgcacaacggcgacaacggcgccttcggccgcgaggagatcgacgtgatcgccccggccgtggccgcggcgcgtgagcgcggcgtggcggcagacggtccgttcccggccgacaccatcttcctgaaggtgcagggcgggccgtcgcagcggcagttcgatgctatcgtcaccatgtaccacgaccagggccagatcggcatcaagctgatgggcttctcgcgcggcgtgacggtgcagggcgggctgccggtgccgatcaccacgcccgcgcatggcaccgcgttcgacatcacgcagcagggccgcgccgatccgggcgccacgctgcaggcattccagatcgcctgccgcatgggcgcgcaacggcgcgccacagcctagccaccaccttcaccacaccaaatccagcaagaccgcccccggcgcggccggggagcgttcgcgccaacgcatcgccatcaggagctgaacatgaagatcaccaacgtccgcgcccgtgtctttgaatggaagggcaagaccgtgccgccgcaggcgcatttctgcaccaacgccaccgacatcctgttcgagcgcggcgacgccatgggctcgttccgcttccacggctggctggtggttgaagtggaaaccgattccggcctggtcggcatcggcaactgcgcgctggcgccgcgcgtggccaaggagatcgtcgaccagtacctggcgccggcggtgatcggccaggacccgttcgacaacgaatacctgtggcagaagatgtaccgccgcacccatgcctggggccgcaagggcatcggcatggcggcgatctcggcggtcgatatcgcgctgtgggacctgatgggcaaggcggttgggaagcccgtgttcaagctgctgggcgggcgcaccaaggaaaaaatctggtgctacgcctccaagctctacaacaatgacgaccgcgacgcgttcctggcagaagcgcagcgctacctcgaccagggcttcaccgcgatgaagatgcgcttcggctacggccccaaggacggccccgccggcatgcagaagaacatcgaacaggtgcgcctgctgcgcgagctggtcggcgacggcgtcgacatcatgctggagtgctacatgggctggaccctggagtacgcgcgccgcatgctgccgcgcctggccgagttcaacccgcgctggctggaagagccggtgatcgccgacgatatcgagggctatgccgagctgaagaaggcgagcccgttcccgatctccggcggtgaacatgaattcacctcctacggcttcaaggacctgctcgagcgccgtgcggtggacgtgatccagtacgacaccaaccgcgtcggcggcatcaccgcggcgcagaagatcaacgccatggccgaggcctggtcggtgccggtgatcccgcacgcggggcagatgcataactaccacctgaccatggcctcgacggcttcgccgatgtcggagtacttccccgtgcacgacgtcgaggtgggcaatgagttgttctactacatcttcaagggcgatccggcgccggacaacggctacctgcagctcgacgacaacctgccggggctgggcctggagctgaacgaggagtacttcagccagttcgacatcatcggctgacgggccagttgccgggttctgcccggccgggcagcgcgccatgtttcacgacaatgcgcgctgccgcttcaaggccgcctcttcttccactcatagtccggtggcgggtcggccgcgccggcccggcccacggcgttgggattctccgagcacagcgtgacaaagctcaccggctcgcccgcgtgctggcgctggcgcagcgcctcggtaaagtgcagggcctcacgcatcgcatcgcttgggaatgactgcgcgtgggggctgagcccggtgccgtcggcttcggaccagtagaccatatacataaggcttcctcttcgttgcggcaggcaattttgcaggatcctgcaaccttcgttcccggcgccgggagtgttgcatgatggcgcgggaggcaggcaaggcacgccggttgcaatccctgcatccacgctttgcaagccttggcatgcggcggcacaatgatcgcttcccgacaccttgccggcgctgcgccgacgccgaccgcctgccgcgccgcctatcatgcccgatcttgcgctgatccccgccacggctgccgatgccgaccggctcgccgccatgcacgccgccagctggcagcacacctatcccggcatgctgccggctgcttacttgcgggaccaggcctacccggaacggctggccgcctggcgcgcccgcatgcacaacggcgcagacggccccgtggaagtcacgctggccatggtcgacggcgaagccgctggctttgcctgcctgctgcccgaggcggagccccgcttcggcatctatctcgacaacctccacgtgctgccggctttccacggccagggcctgggcaagcgcttgctggcccactgcgcgcagcgcgtggccgcgcactggcccgggcggccgctgttcctctatgtgctggaagccaatacgcaggcgcgcgagttctaccagcggctgggcggcgaggaatccgaggcgttcgaggatgatttccacggtccggacctgcgggtcatggtccgccgcgtgacctggccggacgtggcggcgctggtcaggcgcctgggctgaccaggacggcgcgtccgggtcagccgacggcaaaacactcccacaggaatccattccccatgctgcaagcccttgctctcgttgtgccaagcaaaccatgccgggcattggccggtgctgccatcgccatggcagtgctggccggttgcgccagcgcacccgacacgccttccgccgccacggcggtggaggcggcggccacgccggcccaggcgaagccgcactggcagcgcgtgcacctgggcacgggcgcgggctatgacttcccggtctacaccaaccatccactagaccaagacctgtcgcgcatccgcgaggtggtgttcgtgcagcacggcctgcagcgcaacggcgatgattactacgccgccggtgctgcattgctcaaggccagcggccgcaatccggacgaggtgctgctggtcgcgcccaacttccccggcacgccagaccacggcaagggcttcgacggcatgccgcaatggtcggtgcagggctggatgagtggcgagaacgcggtcaacgcgccgttcacggtcagttcactgcaagtcctcgatgacatgatggccttcgtcaccgacaaggcgcgcttgccgcgggtggccagggtgaccgtggccgggcattcgggcggcgcacagatcgtgcatcgctatgccgtgctgaacaatgtcgacgagcgcatccgcgcgcgcggcatcgacctgcgctatgtggtggccaacccctcgtcctacctgtacttcacggcggtgcgcccggccggcgcggacggccgctcgtttgcgccttacgacaaggcagtgtgcccggattacgacaagtaccgctatggcatgcaggacatcgtgccctacgccaagggtgccaatggccagtcgctgtaccagcgctacgccgggcgtcaggtgacctacctggccggcacggaagacaacgaccccaaccaccgcgtactggacaaggcgtgcggcgctgaggccgaaggtcccacccgcctgcagcgcgcccgcggctacctgcgctatgagcgctacctggccagccccgggctggtgatccgccaccaggcctatgaagtggtgggcgtggggcacgaccaggcacgcatgttcggatcgcaatgcggtgccagggcggtgttcgacatggcggaaacggccaaccccgacggcgccgcctgccgcgcgccgcagctctgattccgccggccaagaaaaaacccgcgaatctcgcgggttcaagtccctgcccgcaggaacgggctcggaggagacaaccacagggaaacggttacgtgcccggtcagcccaggctgaatttgacaacctgttcttcgacgccgacaaagcgcaccagctggcgtagcccgctggcgtattccttgatatggtgcccgtccggcgtatcgggcaggcggtagtaaatgggcgccttgtcgcgcatgggcggcaggatgccgatcgggagttcgacggcgtcggcttcccaggccacgtcgcgctcttcggcaagcaggattcttccggtcatggacacactccaggattgctgcaaggtgcggccgggggcgggtatgcgctcgcactggattttcaatgtatggaatgtattgcatccaacgcagaaatgccattcagcgttttttaattctgtctgccaggaaatttccaaaatgacaaatttaacgaatgtatggcatctgctggcgacgccggtgacgacatcgctgaggtgctgcgcaaggccggcattgcgataccatagcgccagccccgcgaagtgcggctaccggcgcgtcccggttccgggtctgccgcatccgcttccaaccattttccatcgccccccgacgggccactgcccagacgcatgtcgacccagcacgccttgttgatttccctgatcgaaaaaccgtcgtccggttatgacctggcgcggcgctttgaccgttccatcggctatttctggcatgccacgcaccagcagatttatcgcgagctggggcggatggctgacagtggctggattgccgcggatgaaaccgaggcggcggaaggcgaggccggtggcggcgaccgcaagaaccgcaagaaggtctaccgggtgttgccggccggccgtgaagaactggcacgctgggtgctgacccccggcgccagcctggatcagcgcgaggaaatcctggtcaagctgcgcgccgatgcggtgatcgggccgcttggcctcggtgacgagatgcgtcggctgatcgcgctgcatcgggcccggctggagacttacctggccatcgagcggcgcgatttctcgacgccggacatggaccgcgcgcaacagctgcgctatgcgctgctgcagcgcggcatccgcttcgagcaggactgggtggcctggggcgaggaactgctgccgctgctgtagccgcgcccgcttgggcggcggctacggcctgccaggccagctgaccggctgcgtcaggccaggtcgacggcgcgcgtgccggcctgcttggcctcgcccaagcccagccggcggcgtgccagcgcatattcctcggcaaagcgccgcaccagctcgcctgcgggcaccacgcgcttgattgcgcccacgccctggccggcgccccagatgtccttccacgctttgacgctggtggagccgaaattcatcttcgacggatccgattcgggcagcgcgttcgggtccaggccggcgcgctcgatgctgccgcgcaggtagttgccgtgcacgccggtgaacaggttggagtagacgatgtcgttggcggtgctgtcgacgatcatctgcttgtagccgtcctgtgcgttggcttcctgcgtggcgataaaggccgagccgatataggccaggtcggcgccggcggcctgcgcggccaggatggcgtcgccgctggagatcgagcccgacagcagcagcgggccgtcgaaccattcgcggatctcgtgcagcagcgcgaacggcgacagcgtgccggcatggccgccggccccggcggcaaccgccaccagtccgtccgcacccttctcgatggccttgcgcgcgaaggtgttgttgatcacgtcgtgcagcacgatgccgccgtacgagtgcactgcgtcgttgacttccttgcgcgcgcccagcgaggtgatcacgatcggcaccttgtagcgcacgcacagctccaggtcatgttcaagccggtcgttggacttgtgcacgatctggttgacggcgaaaggtgccgacgggcggtccgggtgcctggcgtcgtgttcggccagctcggtggtgatgcggtccagccattcttccagcttgggtgccgggcgcgcattcagcgcggggaacgagcccaccacgccggccttgcactgggcgatgaccaggtcggggttggagatgatgaacagcggcgagcagaccaccggcagcgacagccggttctggagttgggcgggaagggccatgggtgaagtctcctgggtatttcggtaaggcgaaaaagcggtgctgcgaaacagggttgcgtcaggccgcgccggtcagcacgtccttctggctggccaggcgcgcgcccatggcggcggccagcgcctccaggcccgagcgcgggcgcaccatgacttcgaactcggcaatgcggccggcgtcgtcgaagcggatcatgtcgatgcccttgagcgccttgccgtccacggccgcgctgaattccagcaccacgctgtggccgtcctcgctgacaaagctgcggtggtagcggaagtcctggaacacctggttcaccgtggtcagcaccagcccaatcgcggcgcggccgggatagggggtgtgcgcgaccggcgagcggaacaccacctcatcggccacgatggcgtcgagcccggccatcgaaccgttggccagcatctggtgccaggcttcaagtgaggcctgtgcggcgggaatcaggttggtggtggtcacttcggtctccttggctggcgtcagtgcgcggcgtcttgttgcgggggttttatgcaaccagttgcatagtgaatggaaaggtagcatgcgccggggcaccgtgcaagcgatgcgggggccaatggtgccggcgccccgccgcgcagtgacgggttgtctacaataggcgggatcccaaccccgcacgccggcccccggcaggagagtcagtgaccactaagccctccgctgcccatcctgaacaggcggccttgttcgatgccgacctggccgcctggcgcgaccatccggagcgcgcgttcgacggctggctggcacggcatggcttccggcacggcaccagcgtggtgtaccgcgccatgtggggcaagctgctgcgctggtcggccgagcgcgggctgccgccgctgagctggtcggcggagcagatcggtgagttcctggacgcgcagcagctgcacaaatcgcaccgctatcgctatacgcggctgatcgaacgggtgttccatcacctggcgcggctgcgcgagggcatgcacaacccggccagccaggcggtgcgcgcccatctcgccgacggcgagaacgatcccaccgcgttcctgctgccgggcgagcgcgacctgctggtggcgcggatacttggcccggccggcatgccggccggcgacacgcgcaccgcggcatcgcccacccaatggaagcgcgcccgcgatgtggccctgctggcggtgctgctcggcggcggcctgaaggtaggcgaagcgcgggcgctgcgggtcgatgccatcgaagccggcgcccccggccggatggcgctgcgcatggtccgcgcggacaacggccgagcctataccgtgccgctgttcagcctggcccatgcgccgctacgggcctggctggcattgcgcgaagcctccggcacgcttggcggcctggtgtttcccgccatgccggcgggccggccgatgcatgccgcctcggtctaccggcgcgtggagatcctgctggacgaggccggcgtgctggccgggcgcagcgaacgcgcgtcgccgcagacgctgcgcaatacctgcgccgccatgcatttcgaggccggcacggcgccggccgaggtggcgcaatgcctgggcatgcgcgacccggagtccggctggcggctgcgcgccgcctatgaggcctggcaggcgcgggcggggctggtggcggaagtgccgggaagccgggtctagccccgcgcgccgggccggctgccctgggcgcatcggcagatcgtggataataagcagcttcgccggcctacgcggcggaaagaggtgcttgcgccacgttttgaatccgccaggccaaggcccggccctgaatcgaattccgacaccgattttccatgcctgaaaccttgctcctgaccggtgccaccggctatatcgcctcgcatacctgggttgcactgctcaatgccggctaccacgtgatcggcctggataatctttgcaacagcagcccggtggtgctggagcggctcgccaccattaccggcaagaccccgcattttgtgcagggcgacgtgcgcgaccgcgcattgctggaccggctctttaccgaacaccgcatcagcggggtgattcattttgccgcactcaaggcagtgggcgaatcggtgagccagccgctggagtattacagcaacaacctgggcgggctgctgacggtatgcgcggcaatgggcgcggccggggtgaaacagctggtgttcagttcttcggccacggtttatggcaatccccatgcggtgccgatcctggaggatttcccgctgtcggccaccaacccgtatggccagaccaagctgatgggcgagcaaatcctgcgcgacctggaaacatcggatccggactggcgcattgcctacctgcgttatttcaatccggtcggcgcgcatgaaagcgggctgattggcgaggatccgcgcggtatcccgaacaacctgatgccgtatgtggcgcaggtggccggcgggcgccgtgaaaagctgatggtattcggcggtgactacccgacgccggacggcaccggcgtgcgcgactatatccacgtctgcgacctggcggacggccacctggcggcgctgggttacctgcgcgcgcagggcaagagcatgaccgtgaacctgggaacgggccgcggctacagcgtgctggaagtggtgcaggcctaccagcgtgccagcggcaagccggtgccgcatgagatcgtggcgcggcgcccgggcgacatcgcctcgtgctacgccgatcccgcgctggccaaccagctgctgggctggcgcgcgcgccatgacatcgaccgcatgtgccaggactcatggcgctggcagtcgatgaatccgcaggggtttgacgcctgacgccccgggcaggtggcgccgcagtgttgtgcaggcgccgcggaagaccagaaaacaaaaacgccacggaattcatccgtggcgttttaccatctgccggatcgcgggtttcagcggatcaggaagtcttcaactgccttgccctgggccagggcctgggtcagccagcccgggcgcttgccgcggcccgtccaggtattgccggcgctgtcgcgatagcgtaccggcaccttgcggttgaccgccttcttgccggccggcacctttgcgccaaaacccaggtcttccgcagtcaggccatattgctcgattttctcgcgaatatccgcgatcaccgtggcttgttcgcgtgccttgatttcctcggcctgcttctgcagttcactgattttctgaacgatttcctgatacgtcgccattgggtcctcggtttccggtggagtggaatgcggtgggtgtgtgcgggggtgaaaatgctgaaaacaattataacggggtcgccgcccgctgcaaatcctgccggactaatcggatgctgtttttgcgaaaattcttggcgccgataattgtgtgaactttcggtgtcgtggtctgtcaccggcatttccgtcgtcgtcggcccggctgcagttccggccgcagttccgggttcaggcccgcaaatggtgcggccgtacgcaaactggcccggcggcagccagccgccgccaaaatcaaatcgccataatcggccgcggcaagccacgtggcgtatatccgacaggccggttatcgccgattaattgcgcccgccaccggcgcggcggctcaagtaacaggaggtcgcgccgttatccgggcagggcggatcatctgggcgtcgatcctgccggaacggggttgggggtgtgccccgcgggttgacacagtcttctttcatcatgtccttccacaacaatatccagatcaagaccctgctacggggcgccatgggaatgctgtcgctgctgctgttgctggtcggcggtgccggcctgcacggcatttcacaaagcaatgatgccctcagggagacttatgcccaccagctcggctccaccgtcgcgctcagcgaggcgatgcaggccaccacgcgcatgcggctggcactggaccgcaacgtgatgcagggcgagcaggacgatcccaaggttcacgtcgaccgctccaaagtgttcgtggaggcatcggaggctgcctggaagcgctatatgaacctgccgcagaatcctgaggaaaaggcgctcgccacggagctgggcaagcagcgccaggcgttcatggagcagggcgtgttgccgctgcaggcggcttcgctcgcgggcaaccaggaagaggccctgcggctggcgaagaaggtgctgcctgacctgcagcgcagcatgtcgagcgtgcacgagaagctgcagaagttccagatgactgccgggcaggccaacttcgatgctgcgcaggccagctttgcgcgtatccgcatgctgtcggtcgtgctgatcgtgctgggcctggcggtcgcggtgctgtgcacggtcacgctgaaccgcgccatcgtcgcgccggtggcagaggcgctggctgtgttcgagcgcatcgcccgcggcgacctgacctcgcgcatcgccagcgtctcgaagaacgagatcggccgcatgatgcaggcgctggccgcgatgcaggccagcctgtcgggcatcgttgccgaagtgcgcaccggcgccgattcgatggcatcggccacgcagcagatttccaccggcaacctggacctgtcgcagcgcaccgaggaacaggcctcgtcgctggagcagaccgccgccagcatggaagagctgaccacggtggtgcggcagaatgccgacaacgcgcgccaggccggcgtgctggccaatgaggcttcgcagatcgcgctcaagggcggcgacgtggtgggccgcgtggtcgacaccatgaacgagatcaacggcgcctcgcgcaaggtggtcgagatcatcagcgtgatcgagggcattgccttccagaccaatatcctggcgctcaatgcagcggtggaagccgcgcgtgccggcgagcagggccgcggcttcgcggtggtggcgggcgaggtgcgcagcctggcgcagcgctcggcctcggccgccaaggagatcgaggcgctgatcggcgagtcgggccagcgcgtggagagcggtacccggttggtggcagaagccggccagaccatgggcgagatcgtccaggccgtgcgccgcgtgactgacatcatgaacgagatcggcgccgcgtcgcaggaacagaccagcggcatcgagcaggtcaaccaggcggtgacccagatggacgaggtgacgcagcagaatgccgcgctggtggaagaggccgccgccgcagccggtgcgctggaagaacaggcgcagaagctcaagaacgtggtctcggtgttcaaccttggcacgggtacgggagtaggggcaggcacggccgcgacggctgtcgctggcagcaccgcacgcaccatgtcggtgcggccggcggcagccgcggcgcattcggcaaccgcggcgccgcgtgccgttgctgcccgcccggccgcggcgcttccggcaagccgtccggcggcgaggcccgtgctggccgttgccggggccgatgatgactggagcgcgttctaaaccactgtccccaccattgccctgttcacacggcgaccgcaagatgccatgatgcggggtttgccccgcgtcctgaccttcttcgcgcattctcttcatcatcgcgcagcccaatgattgccctgagttccatcctgttgctgctggctgccctgctgggcgtggccgccgccctcggcgttcgcgccgggcgtgcggaccagtcagccggtggccgctcgctgcgcatgctgacctggtcggcggcactgttatcgcagctgagcgtaagcctgcccgtactggtggtgatgctgtcgggcagcgtgccggcggccaacgacacggcacagatggcggccagcttcgccgccgccgcagcagccaccgcggctgccaagctgctggtgcagtggctgcgccagggcacgcggctgtggcgcggtgcggcgctcatggcggtcgtcgctggcgccgggctggtggccgcggccggcacccacctgggccgcgcctgtggcgcgggctcggtctcggcgcgcgcctgcatcgatgcagccggcctgccgcaccccgcctggctggcgggcgggctgaccgcgctgtgcgcgctgatgttcgccgtccaccgcgcgcagtcgcgtggcttgctggctgcgcaccacgaagccggcctggccgatgagctggtggacgaggcgcacggcctgccgcgcgggcacgagccccgcctggcgcggcgcggcgcgcgcattcccggccgccccggccgtcttaccgtgcgtgccgcagcgcgcgggcagggcacggtgggcgagtacagcgtggcaacgacgatgcccgaccgcgtcgccttcggccgctggctggaccagacgatcgcgcaggcgcggctggccgagagcggctgcgccgtgttgctgatccatattgccgattaccgcgaagtcgacgaggtcttcgagatccgcgccgacgatatcctggcccaggacgccggcgcgctggcgcaggccgtgctggagccgcatgacttcctggcccggctggcgcgcgacgagtttgccgtgggcgtgccggagctggtccatcatggccgcgcgcaggaactgggttcgcgcatgctcggctcgctggccgagttcatcgccgcgcgcggcttgcagatgcagatcggcgtgaacatcggcattgccatctacccgcgcgatgcgcagacctcggaggcgctgatgcaggccgcgcgcgtcagcctggccgaggcccgccagagcggctcgaaccaggtgcgcctgttcaacagcgccgccggcgaacgcgcgcgccgcacccgcgtgatccggcgcgacctgtggctggcgatccaggacgacgcactgtcgctgcagttccagcccaagtacgatgcgcgccggcgcacgctggtgggggccgaagcgctatgccgctggcgccatcccgcgctgggccaggtgagcccggccgagttcatcaccgtggccgagcagtcgggccagatcgacaagctcgacgactgggtcctgaccagcgtctgccgccaggtgcgccagtggcgggacgccggcgtgcccaccgtgccggtggcgatcaatgtctcggggctgcgctttgccagccgcaatttcccgcaatacctgctcgagcagatccaccagcacgacatcccgccctcggcgatcacgctggagatcaccgagaccgcggcgatgaaggacatcggcaagtcgctggaaacgctggccgagctgcagtcgctcggcatccaggtggcgctggacgattttggcagtggctattccagcctgggctatctcaagcgcctgcgcgtgggcacgctcaagatcgaccgcaccctgatcggcgggctcgacaccgatgcgcagggccgtgccatcgtcggctcgatggtggcgctggcgcacgaactgcgcatgaaggtggtggccgagggcgttgaatcggcatcgcagctggaaatcctcaatgagatggggtgcgacgaggtgcagggttacctgctgtcgctgccgctggatgctgccggttttgccgatgccttgcgcgagcagggcggcgcctgacggctaaagtttgtccgtgacgcggccgataaccggtctggcaggctgccagcgtttgcggcgcagccctgcgccggcccgtccgtcgccggctgcgctgcccgtgctgtccatcctggcggatcaaccgagtcctgcaaaccggaggcgcccatgtcatcgcccagcatcctcgtcgtcgacgattccccttcgctccgtcgcatgatcggcgcctgcctgcgcgcaggagggtttgacgtgaccgaggcggccgacggcgaccaggcacatgcgctcgcggccggcgccagcttcggcatgctggtcacggaccaggtcatgcccggcatggatggcctcacgctgatccgcagtctgcgcgccactgagcgctatgcgtgcattcccatcctgatgctgaccaccgagcaggacggcagcatccgcgaacaggcccgcgccgccggcgcctcgggtttcctgcccaagcccttcgatcctgaccagctgatgcgggccgtgacggcgctgctgtccaccgcgcaccctacctcggaagggtaaggaaagccgggcgtcgcccttcagtcccccggattgctgccgtaaacactggtgggcgaagtcatgccccggtgccagccagcggccttggccgcagcagcgccagcaaaccagcatgagccaattttcgggggctagacgatgaagcacatcgacaaggcagacggcgcgggcgaagagttcctggcctttacgctgggccgggaagaatacggcgtcgacatcctgaaggtccaggagatccgcggctacgagtcggtcacccagcttgccaacgcaccggactacatcaagggcgtgatcaacctgcgcggcatcatcgtgccgatcatcgacctgcgcatcaagttccgccagcagaacgtcagctacgaccagtacacggtcgtcatcatcgtagacctcaacgaccgcaccaccggcatcgtggtcgatggcgtgtccgacgtgctgacccttgcagccgagcagatcaagcccacgccgcatttctccggcgaactggcgaccgactacatccgcgggctgggctcggtcgagcagcgcatgctgatcctggtcgacatcgagaagctgctcaacaccgaagaactcgccgcgctcgaagcggtggcgtgatcccgcggcagcgccaacgttgtccggccggcgccccgcctgccggaccgaacccgcccggggtgcagcaacttgccgcgcccgggcctgcagtactgtcatagatgcgaaacaaccaacccgttacgcagcgcgaatacaagctctccccatcggactacctgatctcgcgcacggacctcaaaggccggatcacctttgccaaccgcacctttatcgaggcaagcggctttgcggccgaggagctgctcggtgcggcgcacaacctggtgcgccatcccgacatgccgccggaagcgtttgccgacctgtggcaggacctgcaggccggccgcacctggatgggcgtggtcaagaaccgccgcaagaacggcgacttttactgggtcaacgcgaccgtgacgcccacgcgcgtcgatggccgcgtggtcggctacacctcggtgcgctcgatggcgacgcgcgagcaggtggaagccgccggcgctgcctatgcacgattccggaccggccgcgcggacgggctggcgatccgccacggcgccgtggtccgcaccgggctgcgcggcctggtgcagggtctgctgcacctgaacctgaagcgccgcatcctgtgggcgcaggccggcgggatggtgtggttcctggccgcactggttgcggtggaagccctgggcggcgcaggcgtggccgcggtgcgcccgtggctgtggggcggctttgcgctggcgctggcatcgtcgttcgcggcaggcaccatgctgctggcgcgcgtgcaccgtccggtgcgccacatgctggactttgcgctgcgcatgggcgcgggtgacctgaccacgcgcttcgagcaccgcagcgccgacgagatcggcgcgctggcgcaggccatgcagaccatgcagcgcagcctgcagtcggtggtgcacgagatccaggaaggcatggccagcatctccacggcaacgcgccaggtggccgcgggcaacaatgacctgtcgcaacgcaccgagcagcaggcggcagccctggagcagacggcgtcgagcatggaagagctgaccagcacggtgcgccagaacgcggacaacgcgcgccaggccagcgggctggcggcgaacgcgtcggagacagcgctgcgcggcggcgaagtggtgggccgggtggtgcagaccatggacgagatcaacgatgcctcgaagaagatcgtcgacatcatcggcgtgatcgaaggcatcgccttccagaccaacatcctggcgctgaacgcggcggtggaagcggcgcgcgccggcgagcagggccgcggcttcgcggtggtggcgggcgaggtgcgcagcctggcgcagcgtagcgccaacgcggccaaggagatcaaggggctgatcggcgatacggtggagcgcgtggacaacggctcggcgctggtgggccaggcgggcaagaccatggaagagatcgtgcaggcggtcaagcgcgtgaccgacatcatgggcgagatcagcgcggcgtcggccgagcagagcgcgggcatcgagcaggtcaaccaggccgtggcgcagatggacgagggcacgcagcagaacgcggcgctggtggaagaagccgccgccgccgccggctcgctcgaagagcaggccatgcgcctgcgcgacgccatcgccacgttccgcgtcagcatgcaggccgaggtgcgtccgcagcgcctgccggcccatgcgcgtgccgatgcggcccagtcactggcacaggcctagtccgaatcaaagacgaggcaggcgcggagcaccggcctgcatgcgtacaaaacgggtgcggcacgccgcgcccgaggcttcagttacaagggggagttgctatgcattggttcaatcaattgcgcgtcacgaccaggctggttgccggattcctggtcgttgccgtgatcggcgccgtgatggggctgctgggtgtggtcaacatggggcgcatggccgactggaccggcaagatctacaacggcgacctgcaggcgctgaaggccgtgcaggacgccaatatcaacctggtctatgccagccgcgcgcagatcgggctgctgtcggcatcgaccatgggcgagcgggcggccgagaaggagcagatcgtgaagtcgctcggcgccatggacgagcgcatccgccaggtcgctggcgctttcgagaaggccgagggcaaggcactggtcaagcagtaccaggagctgtcgccggcgttccgcgcgcgcatggagaagtacgtcgaactgatcagcaagcagccgctggatacctcgcagtttgaaagccaggtgttttccgagagcgccgagctgctcaaggacagccatgcgctggaagcggtgatgttccagatggtcaagcgccgcgacgaccgcgcccgcaacaacatggaagaagcgcgcagcgtttacgacgcgacgcgcctgtggatgctgggcctggtgctgggcggcgtggcgttgtcggtgctgctgggcgtgctgctggcgcgggcgctgtcgcgccagctgggcggcgagccgggctatgccgccgcgattgccgcgcgcattgccgaaggcgacttctccgcaccggtggccacgcgcgcaggcgacaagggcagcctggtctatgcgatgcagcagatgcagcagcagctgtcgcgcatggtgcgcgatttcaaggtgtcggccgaatccatcggcagcgcctcgcgtgaaatcgccgcgggcaacaatgacctgtcgcaacgcaccgagcagcaggcggcagccctggagcagacggcgtcgagcatggaagagctgaccagcacggtgcgccagaacgcggacaacgcgcgccaggccagcgggctggcggcgaacgcgtcggagacagcgctgcgcggcggcgaagtggtgggccgggtggtgcagaccatggacgagatcaacgatgcctcgaagaagatcgtcgacatcatcggcgtgatcgaaggcatcgccttccagaccaacatcctggcgctgaacgcggcggtggaagcggcgcgcgccggcgagcagggccgcggcttcgcggtggtggcgggcgaggtgcgcagcctggcgcagcgtagcgccaacgcggccaaggagatcaaggggctgatcggcgatacggtggagcgcgtggacaacggctcggcgctggtgggccaggcgggcaagaccatggaagagatcgtgcaggcggtcaagcgcgtgaccgacatcatgggcgagatcagcgcggcgtcggccgagcagagcgcgggcatcgagcaggtcaaccaggccgtggcgcagatggacgagggcacgcagcagaacgcggcgctggtggaagaagccgccgccgccgcaggcgcgctggaagagcaggccagccggctgcagggggccgtggcgacgttccgcctggcggccgaggatgcccgcgcggattcgttcgtggcccactcgctgcctgcggcgacggcagtgccggccaaggtgtctcgtgccgccggcgcggtgcgcgccatcgctgccggcaagcgggtcgccaaggccctgcccgccagcacgaaggccgcggctttgcctgcggcggaccatgccgccgcagccgaggcggcagatgccgtcgccacgcagccggcgcggctggtcgcaggcagagcctcgcggcccgcgctggcagccgccgacaacggcgactggagtgcgttctgatccccactggcaacgggccgcgcggcgtcccggatggcaaggctatgacgaccgagatcaacctggctctgccgcatgacgatgcggcccgtctgcgcaaggaattcgagcagttcgtcggggtctcgagcggcctggaccgcgagttcctgccgcccgatttccaggaattcctgcgcgcgcggctgctgcagcatgacggcccgctcaccgagcgcgcggtctcgcggctgctgtccggcggtgaatacggctgggcccgccgcgtgttcgacaagcagttgcccaatgcgctggcggcgctgatgcgcgatgcccggcgctttggcttcgggctggcggtgcagccggactggacgccggaccagcgcctggcgcatgcgcgcgaatgggcggcgcaggtgctgtcggaatgcggcgccgatgctgccttcaccgaggcgctcgccacgcaggtggcggcttccgcggaagacgtgcgggtactggaagagcgcatgcgcacgcccgcatggcgcctggccgaaagcctgcgccagcgcgcctatgagctgatgtacgcgctgcagaccgaagacagcgaagccgctggccgcgcacgtgtgggcgagctgcgcggcatgctgggcctcgccctggagtacggctcggtgcggccggaagaagcctcgcgcgtgctggagcaggtggagcgcatgcgcccggcgctgttccgcgaagcgcccgacgatgtgttcgaccggttggcggcatggctgcggcgcatgttcgggcactgagggcgcggtcggaatccggccccgctgcctccggccatgaatttcgtacagggatgacggacagtgtctgcgtgctgaacgccacatgcggcactcgtcaatagaggaatccagcaggctaccgaaggcgctggtcgcgcgtttgcagaaatgacgcttgcagaactggtttgcgccagatcaagtgtcagggatgtgaactgttacaaaatgggcgcgcccatgtatgttccatgcgacatttggttccccccccgcgtaagtagggattggcattgcgggtcgattgccgatataaacgtaacagtctcacttacactctgtaacacttgtaacggagttgattacagtttgacacgggcgtagttccttagtcgtacgttgtacccgcccagccgcatacaaacgatctggtcgccgggcccgcaagggcatcggtaagcgccggacaagcggccacggtgggtttttggtagcggggataaattggaaagcagtgaagttctccaggagatcagggaggttaacctcgcctatctgctgctcgcgcaacgcctggtgcgcgaaaaccaggtcgaagccatgttccggctcggggtcagcaaggaaattgcggatattcttgccaagctgacttccgcgcaactcgtcaagctggcggcatccaacatggtgctgtgcaggttccgcttcgacgaccatgcgcttctgtccactctcacccacacggccaagagtcatgacatgcagcagatccacgccgcgatcctgcttgcacgccagcctgtggagtcgctcaattgaccgcgctcctgcaggccgagcccacccggagttacacggccacctccgttcccagccgcaagagcgtgctccaggatgcgaaccagacccagcttgcgatcgagctgatcggcctgggtgcgcgcctgcaggtgcttgaagccgagaccacgctgtcgcgtgaccggctcatccgcctgtacaaggagctgcgcggcgtctcgccccccaagggcatgcttcccttctcgacggactggttcaccacctggctgccgaatatccactcgtcgctgttcttctctgcctaccagttcatggtgcaggagggcgagaccgtgggcattcgcgcggtggtggctgcctaccgcctgtaccttgagcatgtttcgctgctcggcggcgaaattgtcttaagtttcacgcgtgcctggacgttagtacggttcttcgagagcaacatgctgcagctgtcccgctgcacgtgttgcggcgggcagtttgtcacgcacgcgtatgagccgcacgcgaattttgtgtgcagcctgtgccgtccgccgtcacgcgcagggaaagtgaagaagctctcgaaagacgccgccgccgtgcagaccaacgcctgatcctggtcaaggtccgccggctggcaagcttgcagcgctggcggacggaccactctccgttcgcccgtgcccgggcaattgtgcgtgactgacgcgcgtatttagacggggatccgatcgtgctagtagttcttggctatgtcgtcgtggttgtggcggtgcttggcggttacgccatgaccggcggccacatgggcgcgctatatcaaccggcggaatttgtgatcatcgggggcgccgccttcggcgccttcatcgccaccaatacagcaaaggccatcaaggccaccatcaaggccctgccgggcctgttcaagagttccaagtacaagaaagagctgtacctggacgtcatgtcgctgctgtacgtgctgctgtccaaggcacggcgcgaaggcatcctgttcctggaaaaggaaatcgcggaccccgccgccagcagcgtcttcagccagtacccgcgcatcctgtcggatccggtggtgatggaattcctcaccgactacctgcgcatgatggtcaacggcaacatgaacgccttcgagatcgaggccctgatggaccacgagatcgagaccttccgccacgaggccgagatccccgcccatgcgctgtcgcgcgtcggcgacgcgctgcccgccttcggcatcgttgccgcggtgatgggcgtggtgcacgcgctgggttcggccgacctgccgccggccgagctgggtgcgctgatcgcgcacgccatggtcggcaccttcctcggcatcctgctggcctatggctttgtctcgccgctggccgcgcgcatcgagctgcaggtatccgagaacgtcaaggtctacgaatgcatcaaggtggtgctgctggcctcgctcaacggttacgcgccgctggtggcggtggaattcggccgcaaggtgctgtattccacggtgcggccgtcgttccttgagctcgacgaccacgtgcgtgaagtcaagagcctgaattaaggcgcgcaagcagcaaggggcaccgtcatgagcagcgcacacgatatgcgtccgatcatcgtccgccgggcaaagtcgcacgccaggccgcacggcaaccacagctggaagatcgcctacgccgacttcatgacggcgatgatggcgctgttcctggtgctgtggctgctgtccagcgccaacaagaagacgctggaaggcattgccgagtacttccgcatgccgctcaaggtggccatcgtcggcggcgagaagagcagccagaccccgagcgtgatcccgggcggcggccaggatgcgctgcgcaaggacggcgacaccatgcgcgcgcgcaccaacgaacccagcgacgagcagcggcgcaacgagcagcaggaagcgcagcgcctgcgcgcgctcaagcagcggctcgagcagatcatcgagaacaacccggtgctgcgccagttccgcccgcagctgctgctggacatcaccagcgaggggctgcgcatccagatcctggatacgcagaaccggccgatgttccgcaccggcagcgccacggtcgagacctatatgcgcaccatcctgcgcgagatcgggccggtgctgaacgagctgcccaacaaggtcagcctgtcgggccataccgatgcggccaactattccaacggcgagcgcacctacagcaactgggagctgtcgggcgaccgcgccaacgcttcgcgccgcgagctgatcgccggcggcatgcaggagggcaaggtgctgcgcgtgctgggcctggccgcgaccatgccgctggacaaggaagacctgctggcgccggtgaaccggcgcatcagcatcgtggtgctcaaccacaaggcccaggcgcgcttcgaggccgagaacgccagcgctgccgaggtcacggtggcggcgcaggccggcaaggccgcgcaggagatgcaggcagggctggcagcggcctcagcgcccgcggctgcgcccacgggcagcaaaccatgacgcgcggccgttgcggcagcgccagtgcagtaaccaagtgactcaggacgccatgtctgtcgatatcgatatcacacagttttaccagaccttcttcgaggaagcggaagaactgctcgtcgaaatggagcagctgctgctcggcctggacattgagtcgcccgatcccgagcatctgaacgcgatcttccgggcggcgcattccatcaagggcggggctgccaccttcggcttcgcggcgctgaccgagaccacccatattttcgagaacctgctggaccgcacgcgccggcaggaactggcgttgaccaggaccatcatcgacacctttctggaaaccaaggacgtgttgcaagaccagctcaacgcctaccgcaacggcaccgaacccgatccggaaacgctggcgcgcatctgcgccgtgctgcaacagctggcgcaggaagccgccggccatgccggcgcagctgccccggcgcccgtacctgttgccgcaacgccccccgctgctgctcctgcgggcggcgggctcaagatccgcctgatccgggtttccgcctccgaccaggcgctgctgcgcgaggaactggccaacctgggcgagatcaccggccagcaagaggtgaatggcgaactggtggtgtggctcaacacccagtgcagcgccgacgacatcatcgcggtgtgctgcttcgtgatcgacctggaccagatcgtgatcgaagccgaagcccctgctgctgctcccgcggtggtcgaggcccctgtcccggcgcccgtcccggtcgccacggcccccgcccccgcagcggcggcgcccgccgccgcgcgcgagaaggccaagccgcaggcgagcgccgcgcacggcgaaggctcgatccgcgtgccgaccgaaaaggtcgaccagatcatcaacctggtgggcgagctggtgatcacgcagtcgatgctggcgcagaccgcctcggcgctggacccggtgctgttcgaccgcctgttctccggcatgggccagctcgagcgcaatgcgcgcgacctgcaggaagcggtgatgtcgatccgcatgatgccgatggactatgtgttctcgcgcttcccgcggctggtgcgcgacctggccagcaagctcggcaagcagatcgacctggtcaccttcggcaaggccaccgaactggacaagagcctgatcgaacgcatcatcgatccgctcacgcacctggtgcgcaacagcctggaccacggcatcgaaacccctgacaagcgcgtggccgccggcaaggacgcgaccggccagctgatcctgtccgcgcagcaccatggcggcaatatcgtcattgaagtcagcgacgacggcggcggcctgaaccgcgaacgcatcctggccaaggccatccagaacggcctgccggtgtcggagaacatcaccgacgaggaagtctggcagctgatcttcgcgccgggtttctccactgccgaggtcgtcaccgacgtgtcgggccgcggcgttggcatggacgtggtcaagcgcaatatccaggagatgggcggccacgtccagatcagctcgcgcccgggcctgggcaccaccatccgcatcgtgctgccgctgacgctggcgatcctggacggcatgtcggtcaaggtgggcgaagagaccttcatcctgccgctgaactgcgtgatggagtcgctgcagcccaaggccgaggatgtccacaccgccgccaactccgatcgcgtcatgcacgtgcgcggcgaatacctgccgctgctggaaatgcaccgcgtcttcaacgtcgccgacgcgctgcaagagccgacgcatggcattgccgtgatcctgcaggccgaaggcaagcgctttgcgctgctggtggaccagctgatcggccagcaccaggtggtgctgaagaacctggaaaccaactatcgcaaggtgccgtgcatctcggcggcgaccatccttggcgacggcagcgtggcgctgatcgtcgatgtcggcgcgctgcagcgcaccggcgtgcgccggcaggaaccggcgctggcgcagtaaccgaccaaacacaggagaactagacatcatggccggcatcggacacatcgatacccccggaagcgacgcttcgggccaggagttcctggtcttcacgctggggtcggaggaatacggcatcgacatcctcaaggtgcaggagatccgcagctacgagaccgtgacccgcatctccagcgcgccggacttcatcaagggcgtgaccaacctgcgcggcgtgatcgtgccgatcgtcgacctgcgcctgaagttccgcctgggcaacgtgcgctacgaccaccagaccgtggtcatcatcctgaacgtggccggccgcgtggtcggcatcgtggtcgatggcgtgtccgatgtgctgacgctgaccggcgatgcgatcaagcccgcgccggagttcggcgtgtcgatctcgaccgagcacctgaccgggctgggcaccatcgacggccgcatgctggtgctgatcgacatcgaacgcctgatgaccagcgccgagatggcgctggtcgaggccgagctggcctgaccctgcgcacgcaccactgaagcaaatcccatgacgccgttccgcaccgccgccagcgttcccggccagaccgggtcggtccttgcgccgggcgccatcctgcggcgcgacgacgcgcgcgacttcctgctgaccgaacgcgatttcgagaaaatccgcgcactgatccaccggcgcgcgggcatctcgctgggcagccacaagcgcgagatggtctacagccggctggtgcgccggctgcgcacgctgcagctgtcggacttcgcctcgtacctggcgctgctggacgctgacgaccgctcttcggagtgggagttcttcaccaatgcgctgaccaccaacctgacctcgttcttccgcgaggcccatcacttcccgctgctggccgagcacgccaaaaagaccggccgcccctacagcgtctggtgctcggccgcgtccaccggcgaagagccgtactcgatcgccatcacgctggcggaggcgctgggcgaccgcgccggcactgtgctggccactgacatcgacacccaggtgctggccaaggcccgcggcggcgtgtattccgcggagcaggtcgcgcggctgtcgccggaacggctcaagcgcttcttcctgaagggcaccgggccgcgcaccggttcggtcaaggtcaagccggaactggccgccaccatcgcgttcgagccgctgaacctgctcgcacccgactggggcatgcgcgagcagttcgatgccatcttctgccgcaacgtgatgatctacttcgacaagccgacccagggacgcatcctggagcgcttcgtgccgctgctcaagccgcacgggctgctctttgccggccactcggagaacttctcctatgtcacgcgcgcgttccagctgcgcgggcagaccgtatatgaactggcgccggacgcggccagggcgggaaggccgtgatgcgcacgccccatctgcccgaagcgcttgccacgcgcacgtatttcgaccgcgagttcggcaagcaggccatcaagctgttgcccaacgagtactacgtgacccgcgaggacgtggtgctgaccaccgtgctgggctcgtgcgtggcggcctgcatccgcgacgagagcgccggcgtgggcggcatgaaccacttcatgctgcccgatgacgacggcagcgccgaccgcatgctgtcggcgtcgatgcgctacggcagctatgcgctggaagtgctgatcaacgaactgctcaagatgggcgcgcgccgcgagcggctggaggccaaggtcttcggcggcggggcggtgctggccaatatgaccacgctgaatatcggcgagcggaacgcggatttcgtcctgcgctacctgaagaccgaggagatccgcgttgcggcgcaggacctgcgcggcccgcatgcgcgccgtgtcagctacttcccggtcggcgggctggcgctggtgcgccgcctgacgcggcaggacgaccaggtttcggtggcgcgcgacgagcgcgcactggcccgcgccattgccacctcggcgcgggcgccggcgcaatcgcctgaattgtttgcgcggcagtctttctcgcgccagcttgcctgaaaccaatacaagcacgatcaatcatgacagccgccaagatcaaggtgctctgcgtggacgattccgcgctgatccgcagcctgatgacggagatcatcaacagccagcccgacatggaagtggtgggcaccgcgcccgacccgctggtggcgcgcgacctgatcaagcgcctgaacccggatgtgctgacgctggacgtcgaaatgccgcgcatggacggcctggacttcctggaacgcctgatgcggctgcggccgatgccggtgctgatggtgtcgtcgctgaccgagcgcggttccgagatcaccatgcgcgcgctggagctgggcgccgtggactttgtcaccaagcccaagctgggcatccgcgacgggctgctggaatacacccacaccatcgccgacaagctgcgcgccgcgtcgcgcgcccgcgtgcgcgcggccgcgcaaccggccgcgccgacggcggccggcaccgagcccgtgccgatgctgcgcagcccgctgctgtcgaccgaaaagctgatcatcctgggcgcctccaccggcggcaccgaggccatcaaggaattcctgatgccgctgccgcccgacagcccggcggtcatgatcgtccagcatatgccggccggctttacgcgctcgttcgcgcagcggctggatggcctgtgccgcatcaccgtcaaggaagccgtgcacggcgagcgcgtgctgcccggccatgcgtatatcgcgccgggcgattcgcacctgctgctcgcgcgcagcggcgccaactatgtcgcgcacctgtcgcaggaagcgccggtgaatcgccaccgcccgtcggtcgacgtgctgttcgattcggccgcgcagcatggcggcaagaacgtgatcggcgtgatcctgaccggcatgggccgcgacggcgcgcgcggcatgctgcgcatgcgcgaggccggtgcctataacctggcccaggacgagcacacatgcattgtgtttggcatgccgaaggaggcgatcgccaccggcggcgtgcatgaagtcgtgcccttgccggcgatgacccagcgcgtgatggcacgcctggccacatacggcacgcgcgcgcagcgggtgtaaaccaaatcgggccgagcggggcgcgcatgccggcgcgcggcgctcgtcctggcaacaagccaacactgtatttactggagccctcaaagtggacaagagcatcaagatcctggtcgtggatgatttcccgaccatgcgccggatcatccgcaacctgctcaaggagctgggtttcgtcaacgtcgaggaagccgaggacggcgccgccggcctggagaaggccaaggatggcagcttccagttcgtgatctcggactggaacatgcccaatatggatgggctgaccatgctgcaggcgatccgcgccgatgccaatatcggcaagatcccggtgctgatggtgaccgccgaggccaagaaggaaaacatcatcgccgcggcccaggccggcgccaacggctacgtggtcaagccgttcacggccgccacgctggacgagaagatcaccaagatcttcgagaaactcggcggctgaggcggaggcgcgtttgtcatgaccccgaccctgagcaatgattccgccgagcaactgatcatccgcatcggcaacctgacgcggatgctgcgcgacaatatgcgcgagctcggcctggacaaggagatcgagcgcgccgcgcaggccatccccgatgcgcgcgaccggctcaactacatcgccgcaatgaccgagcaggccgccgagcgcacgctgaacgcggtcgaactggcgcagccgatccagtccgatatcgaacagcaggccgaaaccctggacaagcgctgggaggcttggttcgagaagccggtggagctggccgacgcccgctcgctggtgctcgacacccgcgccttcctgtccgaggtgccggcccaggcccgcgccaccaacagccatctgctcgacatcatgatggcgcaggacttccaggacctgaccggccaggtcatcaagaagatgatggacatgatccgcgcgctggagcaggagttgctgcaggtgctgatcgacaatgtgccgtccgagcggcgggtggaagtgcaggcgccgtcgacgctgctcaatggtccgcaggtgaacccggaagggaagccggatgtggtgtcggaccaggcgcaggtggatgatttgttggcgagtttggggttttgagggttcggttgggctggtggcgggaagccttcgattgcgctgcgcgcacgcgctatctcaggtcttgggctagggcacggagtgcatcgctgctctcgcacagcgtggttgcgtgcgagcccgacagcttgtttccttcccgcatgttttctcccctctcccgcttgcgggagaggggcgggggagagggccggcgcatccacgaagtcaaccgcatcaacacctgcgcacccacatcatccccggcaacccagcgatggacgctcttttaagagtttgcccatactcgcgcttgctgcccctcttcatactgggttcgtcgctgcatagtggcgaccgggtttagcagcctgagtgagagggaagccgaccgccttctggcggtatccttacatccgccatactgcgcacgcctcttccatgggcgggccatggcgggggagccctcgggctcgccggctccttctcaccggtctgctaaccctgccttgcgcccgcccgccccgattagcagcggggtagcgggactgaacctgtatgagagggagtagtgccatgtatcagtctttccttgcccattccgggcgcttgattatcccccgcgctttctcgctgcatcagcgcccgcagacgtcgcatgcggaggtgcgccatgtatagccatagtcatcacggtattactgcggaacacaatggtgtcgacatgctcgtgaccgcccatagcccgggggaaaatccgttgagtcttgcggtgcaacgtgcggcgcagcttcatgggcttctgctcatggctagcgatcatggtgcctcgagtctggatccggtggatctggagcaggggatgtgggaaagcttgctttccctcgcggcctggctggcgcatgagacgcaggtgttgagtgagctggccgtgctgcagggtcaggtattgcagactgactgacgtttagcgggggggggcagccgtgcaatcggctgccgcgcgcctcctcggcgcgcaggtcaacttccccgatttcaaagcggttgaaccacacggcaaagacgccatcacgccgagtcgggcgcaggcgagacttcgccgtgcgccaccgaggcaaacgcctacctggggcgagtcaatcgctcgcctttggtgctggcttcccgagcgccttgtccctccatttacaactgacacgcgaagcttgccaggtcgggatcgcttcgtggccagtactggacgcactggcccaccacacgcaagacggcgtccgctaaaccgcgttattcgcgccccgcggaatgtaaaggattgtgatggcgtgaggcgcgaagcctctcgcgtgcgctaggctgaagccctttgcggcgccggattgcgggtgcgcgacggcccgggtcatgcttggaccgggtgccgcattgtcccgaaaaattgcggaaatatccgccgcgaagttcggaatcatccgaccccgacgccagagttggctgggtacagtggctagcgttggcctcagtctggcctctggcgggcgccgccgaatcgtctgcgcacccgctccgtccaagcatacgaatgaacaggaacctctatcgtctggtgttcaatgccgcatgcggtatgccggtggcagtacaggagtgtgccacgggacgcgccaaaggccgccacggcagcgtggggagcaacggtggcaatacggccttcgcgccggtgttgtggcgtgccgcgctggcaacggcgatgatggggttaccggcagttctggaccaggcggcacacgcacagacgctgccgatccaggtggacaggaacgcgccagggcaacgcccggtggtgggcgtggcggccaacggcgtcccggtagtgaacatcgccccgccgcaacgcaacggcgggaccagcgtgaataactttattcagtacggcgtgggaccgtccggcgtagtgctgaacaacagcggccagaattcgcagacccagattgctggctgggtgcagggcaacatgcagctgggcaacaacagcgccagcaacatcgtactgcaagtgatgcagcctaatccgtcgcaacttatgggacagcaagagatcgccgggcgccgggcgaacctgctcctggccaaccctgccggcattacctgctcgggctgcggcgtgatcaatgccgaccgcttcacgctctccacgggccgcccggtgtttggcgccgatggggatgtcaccggcttcgacgtgcgggcgggcaacattgccattggtgggcagggcctgtccagcccgcaggcacaggtcgatctgctggcacgctcgatcagcatcaacgccgagctgtgggccaggcatctgaacgcaatcaccggcgcaaaccagattgaccatgcgacgctcaacaccacgccgcaggctgtcactggcgccgcgccgcaacttgcgctggatgcggcggcgctgggatcgatgtacgcgaattcggtacggctcatcggcaccgagaaaggcgttggtttcaatatcggcggcggcatctcggcgcgcgcgggcgacatcgtggtggacaacaacggcgacgtacgcatcgcgccgggtggccgcctgcaggccgacggcagtgccacggtggcgggcgccaacatcgacaacgccggcaccatcacgacgcgcggcgccatcgcgactaccacgccgggccagttgaccaatagcggcgtgcttgccgccggcaccgacctgacgggccaggccgacagtatcgtcaacagcggcaccatcggcgcaggcgtcgatgccaatgccaacgggaccggcgcgggcacggccaacctcaccgcaggtacggccatccggtccaacggcagtatcctgaccggcgcggacatcaacctgtcggcgccgacgctggacctctccaacggcaaagtcacctcgcacgacaccgccaggctgtcagcctcgggcgacatcacccaccggaacgcgcggctcgaagcgaacacggtgcagataagtgccgcaggcacggtcgataatcgcggagcggccatcgtggcaggcgtcaacggcggcaccgtgcgtggcaccagcgtgctgaaccagcgcggcaccatcagcagcggcggcgcgctgggcgtcgagggaacgcagacggtggataacaccggcggcgctgtggccgggacgctcgccaccacggtggcggcgcccggtgtggtcaatcgcagtggcgtgatcggctcggtacaggacaagctgaccgtgaccggggcgcttgacaacaccagcggcaaggcactcgccgccaccgatctgcgcgtcaccggcggcgccatcgtgaacgatcacggtcagatgtccgccggcgagaccctgaacgcggataccgccggccaggcgctcacgaataccgcgggcgtgatcgcggcggccaacattcaggccgacaccggccgcttcgataaccgcgcgggcgtggtgcagtccaccgggctgctcgtggccgacacgcacggacagcgctacgacaacagccagggactcactgtcgccaacggcgacctgacgctgagtaccggcgccttcggcaaccaggccgggacggtctccggcaagcagtcggtcacggtgaacatgacgaccttcggcaatgcgggcggcaaggtcgtgttgggcgggccgctcgccatgaccggcgacagcctctccaacaacggtggccagctcgcctcgaacggcgacgccaggttccggattgccggcaccttcgacaacacggcgggtttcacgcatgcaggcggcacgctgggcgtgcaggcgggcaccctcgtcaaccgcgacacgctgggtggcaccgaaaagacgccgaggggcatggagggcgccagcgtcaagctcacggcaaatgccatcgacaacggccagggtgcgctgcgcgccgatgccgtgcttgacgccgatgcggcgacgctcgacaactcccggggcgaggtgacctcgggtggcacggcgcaactgaacgtgggcactaccaccaacaccgatggcctgctcgccgccaatacctcgctcggcatccagggcaacactctcaccggcgacggcacggtccagtcgcaaggcgatctcagcgccaggctgaccggcgacttcaacaataccaagaccgtggccgccggcaagacgctgagcctggacaccagcggggatgtggccagcagcggcaagatgaccgccggcgaggcgctggatgtgcacgggcgcaacgtgagcaactcgggcgagttggtcggccaggtctcgaacaccatccgtgccgaccaggcggtcaccaacagcggcctgatcgacggtggcgcggtgcgcgtgcaggccggcacgacagtcaccaacaccgagcgcatcttcggggacactgttgccatcggcgcaggcgtgctgatcctgaacgaccggaacgccgccaccggcaagggtggtgtgatcgcctcgcgcaccggcgatgtggaccttggcgcgcccgatatcgtcaaccgcgaacacgcgctgatcctgtcctcgcaggacctgagggtgggcggtgctctggacgccgatggcaaggccacggggcaggcgagctcgcttaccaatgcctcggccgtcatcgatgtcgcacgcgacgccgacatcaaagcggccagcattcgcaacgaaagcagccatttcgagacccaggtgacggacactggcgtccaaaggacgctggtctatcgcctcaaaggctccctggaagatatcgatccggccacggcgctcatcttcgactggagcggcaaggacgattatttccatgctggcacggacctgggctggctgtaccgggatggcaaccagaaaggcgtcgcacgcttgctgctattgccctcggaacaatatccattcgcggagttcgggccgccgttcgactggtcgcgccgccctgatggcgaggcgggaccggtaatgtactggcaggaccccttttacgtggactactacggcggcatgccgaaaaacacatggtcgccggtgggactggcctacacgttgcacttcgagaacgatgtcaacggcaatccggtgctgatggcggaaaagtacaactacccgcccgaccatccgatctgggacaagctgaaggtcgcgcgtcccgacagtgcgccgccaccataccctgccgcttgcgaggtcaatgccccgcccgcctgcatcgctgcgcaccagaagtaccgggactggcatgacgccaacattgccaggtacgaggcactgaacgacaagatcatcgccttcaacaaggatttccacgcgcgcaccgtcgataacttctattccgttgacaagcagacgcaagtgcgcgaggaggtggtcttgcacaccgatcccgcccgattgctggtcggcggcaacgccacgctcaatggagccgtggtcaacgacaagagcgagatcgccatcggcggaacactgaacgtgccggcaccggtgcggaacgaaggatataccggcacccggttcgagactgtcaccggcacacaggcgtggcactacatcaaccacggcgtcaatgcaccggaccggcgctcgaccacagcggaaatcccgcccctcgacgtgacgctgccgctgcaactggcaaccggcacaacgcagcagaatctgcagaccgtcccgggcagtggcacggccatcgacccgagagcgggcgtcacaccgatcgccagcgcgccgaccctgacgcaggtcgcgctcaacccaggaggggccacagccggcgggcgtctgggtggcgaggtgatccgcaccgtcacgccgtcgctggcaatgccgaccaacgcgctgttcgtcacgcggaccgatcccggtgcgcgctacctgatcgaaaccgattcgcgcttcaccaaccaacgccagtggctgtccagcgatttcatgctgacccagttgggccaggacccgacgagggtcctcaagcgcctgggagatggcttctacgaggcgcggctggtggcggacgccgtgatgcttggcaccggtcagcgtttcgtgggcgactacaccggcaacgaggcccagtaccaggcgctgatgcagtccggcgtcgaattcgccaggcagttctcgctgaacgtcggcacggcactgactgccgagcagatgcgggcgctcaccaccgacatcgtctggatggtggagaagaccgtaacgctgccggacggctccacgcagcaggtgctggtgccgcaggtgtacctgaaggtgcgcgcgggcgacctcaagggcgacggcacgctgatcacggcgcgcaacgcgaaggtccggaccgacggggacgtgaagaacaccggcaccatcgcggcacgcgatgtgatgctgatcgatgcgggcaacatccgcaacgagcgaggcacgctgtcagccggtgccatggggctgaatgccaagcaggacctcgacaacctggccggcaggatcagcgccgacaacctggcggtcaccgcaggccgggacatcaacctgaccaccaccaccgcgtccgcgggcaacagggtcggtgaatccaccgccagccgcaccgtcatcagcggcgtcgccagcgtggaggcggacaatgccgtctttgtggcgggccgggacatcaacagccaggcggccagcatcgcggcagccgacagcctcggcatgggcgccgaacgggacatcaacctggacacggtgcaggtggccgagggcttcgatgccgtcgcggacgcgaagaaccgttccagcgttgtgcacacggcagagatcggcacgctgatcacaggccgtgacataacgctcgctgccggccaggacgtcaatgccaaggcagcctatgtgagcgccgatgatgccatcgcggtcagcgcggggcgcgatatcaacgtgacggccggcgaggccggcgtggcgatacgcgacgagcagtcgatgcaaagcggcggcttcctgtcgaagaagtccacccataccatcgatgcggcaagccgcaccgaggcgctgggcagcaccttctccggcgacacggttgacatggcggcagggcgggaccttaccacctcgggcagcacgattgcggccacgcacgacgtgaatctcgacgccaggcgcgacatcaccatcggcactgccgaaaccacctcgtcgtcctacagcttcaaggaggagaagaagtccggcttcggcgccaccggttccggcctctcctacggcaagcgcgagcagaaggacaccgtcaacgacaagggcatgcagcaggcgggcagtctgatcggctccaccgacggcagcgtgcatatgaaagcgggcagcacgctcaaggtcacgggcagcgacctgatcgccaggcaggatattaccggtgtggcggcggacgtgaccatcgaggccgcgcagaacagccagcaccacgacgaaacccatgaggtcaggcaaagcggcttcacgctgggcgtgtcgggcggcgccatcggcgcggcgatcaacgcgggcaacaaggtcagctcggccagcaagagccaggacggacgggcttccgcactgtggggcatcgcggcagcgcgcgacgtagccgataccggtgcggcgctggcgcaggccgggggcgatccgttaaaaggtgctgcggtcaccctctcatttggcaccagccagagcaagcggaccctcaccgaggacagcatcagccacaacggcgccaatgtctcggcgggtggcacggcagccttcatggcgacgggcgtgaacgccaatggcaacaagacagccggcaacctgaacgtcatcggctcgaacatcgatgccaacaaggtggcgctgggtgcgaagcatgacatcaatatcatgtcagccacggacatgaacgagagccacagaaccaacaaatcgagcagcgccagcgtcggggtctcctacggcgcgcaagggttcggggtatcggcgtcggcctccaagtccaagggcaacgcggacagcggaggcacaagccaggccaacagccatgtgaccggcagggaatccgtcaccttcgtctcgggcaatgacaccaatatcctgggcgccatggtcggcggcggcaaggtggtgggggacgtgggtggcaacctgaacatcgccagccgccaggacaccgaggagatgcgcgccaggcagcaaagcatcggtggcggcttcagcatcagccagggtggcggctcggccagcttctccgcaagcaagggcaaggccagtggcaactatgcgaacgtgagcgaacagtcgggcatccatgcgggcgacggcggcttcgacatccgcgtggaaggcaacaccgacctcaagggcgcggtgatcgccagtgttgccggcaaggacaagaaccaccttgataccggcacgctcagtttcagcgatatgcagaaccactcggactacagcgcgacctcgtttggtgtgtctgggggcattaccgcgggtccgcagaacggtgagaaaaacagcggccagacttccggcagaaacaccggcggcatcagtcccatggttccgcagcacgagagcggcagccaggacggcgtggcgcgcagcgcgattgcggatgggaccattaccatccgcgacgaagccagtcagaagcaggatctggcagacctcaggcgtgacaccgtcggcaccaataccacggtgggcaagaaccccgacctgatgaacgtgctcgacaagcaggccgacatgatggcggcggcgcaggcggctggcgaggcggttgctaagacggtaggccaggttgccaacgccaagcaggaggaagcgcagaatcggtacaagaccgctgcgcaagcgtatcagcaggatcccagcgccgaaaaccaggcggccatgacggcggctcagtcggatattgacggctggaaggaaggtggcgactatcgcgccgcgctgcacggtgcgggcggtgcgctcgttgccggcctgggtggcggcaatgcgttggccggagctgccggtgcagcaggcgcatcactgtcggcaccgaagattcagaatggcgtgaatgctgtctataccaacgtcaatactggaaataccgacctcgatcacgctattgccaacatcgccggcaatatcgccgcaggcggtatcggtgcggtgattggcggcggttctggcgcgtcgaccgcctcaaatgtagaccgcttcaatcgccagttgacttatgccaagtccgaggacatgaagacggttgcggcaaaggaagcggccaaggcgggcatgaccccagagcagatggaaaaggcaatgggcgtcgtgcttggtacctattacgatgagaagggtgtagcgaaatcggaaggcgttacttacgaccaatatatgaaggcgcaggccgcgctactgtcacagccggccaattcgccgctggctaaagagtatgctcagtctcaacggggggtactaccgcagtttgcctttggggatgcagatggggcgccaaattttggccgtgttccattgtttggcataccaacaatgggggccatcgatgacgcagtagcgtcccaggcagcgattcgggcgagagtcgaaggaaacgtcgcggaaagtgcggctgcccgcgcaggttcaaacttcaataagctgaatgaatggccgcctaataacggatttgtccccggtacaggagagcgctacacccttttcccaggacaattcgtggaccgatatggttctgtgcaaggtacattcgttgctgaagccggtgcttcatatagatctcgtgcacttcgcccggggtccgatagtgccccataccatgtgtatgaagtcactcgacctattgaagtaactgcaggcccaactagaccttggtttggctatgaaggtatgggaactcaatacaaatttgatgaatcggttcgaaatttgatcaatcgtggcgcattgaggagaacgcagtgaatgccaaggaattgaaaagtgaactagatcgactcggcgttccgcgccgtgtctattccttgtccggatggagagatgagaggttgtgtctcgaggagcgtagtggaacgtggcatgtcttcttcgtcgagagagggggcgagcgtccgttaagagagtttcaatccgaaaatgatgcttgtcatttcatgctcgaggaactgaagctagaaatctgaaggattgcctgcagtcaatttttatgaccgtctcctcattctaggcgcatgacgtctcccctttttgtcccaggcgtcgtgtcccggatcaggactgtcgagatcaatgtcgtcaaagcgtaaggcgctatatcgaaggtttgcatcgccagccgttcagaacttcttttggactgtcggcatggtgtatctgtcgcacaagctgcagaacgatcccagtgacctggcctggcgcctttgcgtaggcatcatgctgatgcagatcattgtgacggcactgcagctgcttacccaggtcaatttgctctcgctaatggggttcgctttggcgatctttggccttggttcccttctcgttggaagagagagttcaccggtgcacggcgaagtctccgcgagcgatacgcaagaagaataggtacatctccaatgcgactagattctcaggcgcgtcgcaaggcgcgcggcgtcttcccgtttgtcccgttcctgctgacgttgccctccctggccgccgcccaggcccaacccttcttcccgcaggttacccccaacgacgccatcgagcgccgccaggaacaacagcaggaggccgcgcgcgaacgtgccatggcccgccccgatgtgctgacgccgggtccggccgagccggccctggcaggcccgctgatcctccgcaacgaatccccctgcttcccgatcaagaccgtgcactgggaagacgccgatgagttcgagtggttgcaagccgaggccagcatcctgcccggtcagtgcgtgggcggccaggggctggaagccatccaggactacttctccgcacgcttggtagtccgaggctacatgaccacgcgcgtgctgattcctgagcaaagcctcgccagcggtgaactacggctgcgcgtggtggccggacacatcaccggcgtcaaggccgagggcacgcccggttggtggcgaaccgcgctgccgacccgcccgggagggctggtgaaccagcgcgacctggaccagggcatggagaacatgcgtcgtctgcagggccaggccgacgccagtatcgacctggtaccgggagagaagccaggcgataccgagttggtcgtcaagcccggcaccggcaagcgctggcatgccctgatcacgggtgacaacgccggcctggacaacaccggcaagtaccagatgggcggcacgctgacggtggattcgccgttgttcctgtacgacagcctgaccatttccggcaacaccaatgccaacctcggcaacggcgcggccggtgcgcgctcgtcggccatcaactacagcattccgtttggctactggaacgcctttttcaacgccaaccagtcgaaataccaccagaccgtggcgggcttcgagggcgatatcgcctacggcgggcgcagcacacagatcgaggcgggcctgggctatgtgccgtttcgcaacgcctcgggcaagaccagcctgtacggcaaggtgttccgcaagaccgccagcaccacgctggacggcatcgacatcgccgtgcagcgtcgggatttcgtcggttacgaggtcggtgcctcgcatcgccagtaccttggcaacacggtgctggatatcggcgcggcctggcgtgcatccctgcccgcgcattccaagacgcccggcttcgtgctgggcgatccggactggggcggcaagtctgaactgctgctcgccaacgcgggcctgatggtgccgttccaggtcgccgggcagcgcctgcgctaccagggcaacctgcgcatgcagtacgcgcacacccgcatcctgccctccgactatttcgttatcggcaaccgctactcggtgcgcggcttcgatgagcagctgacgctggccgcggagaacggcgtgacctggcgcaacgacgtggcctggcaacttggcaatactggacaagaagcctttgtcggcttcgacgccggccacgtcagcggcccgtctgcggcattcctggtcggccagaccctgatgggcgcggtgatcggcgcgcgcgggcgctgggccatgggcggctttgccgcgctgacctatgaggtaacgctcggctggccggtcaggaagcccgagttcttccgcacgcgccagcccaatctcgctgcgcagatcggggtggagttctgatccgcccgaacggtgcggagtatcgacttgctgctgtgacagagcatgaatgtagtgttgacccaactgaaggagaagatcgcatgaacaaagtgacggccatatccctggtcgccgcggccgggctgctcgccatgctcggcggctgtgccaccgaatcgtccacggcgctgccggtgcagaaagtagagagcgccagccgtccctacgccggcgtccgcacgccgatttcggtcggcaagttcgacaaccgttcgagctacatgcgcggcgtgttctccgacggcgtcgaccggctgggcggccaggccaagaccgtgctgatcacgcacctgcagcagaccaaccgcttcaatgtgctcgaccgcgacaacatggacgagatcaagcgcgaggcagccatcaagagccaggctcagcgcctgaagggggccgactacgtgatcaccggcgacgtgaccgagttcggccgcaaggaaaccggcgaccagcagctgttcggcatcctgggccgcggcaagtcgcaggtcgcgtatgccaaggtcgcgctcaacgtggtgaatatcgcgacctcggaagtcgtgttcaccgcccagggtgcaggcgagtacgcgctgtcgagccgggaggtaatcggctttggcggcacgtccagctatgactcgacgctcaacgggaaggtgctggacctcgccatgcgcgaagccgtgaccaacctggtcagcggcatcgaaagcggcgcctggaagcccgtcaccccctgattccaaaaaaacagccaaggagaaatcgtgaagacattgttccggccgcagcgcctggcggtgcctgccctggtcgcaagcgcattgctggcgggctgcgcggctcccgccaagcccctgtatcagtgggaaggctaccagccgcaggtctaccagtacttcaagggtgaaccgaagcaagcccagatcgaggtgctggagcgcgacttgcagaaaatcatggcggccggcaataccccgccgcccggctaccacgcgcacctcggcatgctgtatgccgatatcggcaaggatgacgaaatggtccgcgaattccagaccgagaaggcgctgtttcccgagtcgggagcctatgtggacttcctgctgaagaacgtcaaaagcaagggagagaagaaatgagcaagctgttccatcgcgtcctgatgctgctgggcgtcgccacgctggcagccggctgtgccgcgccgacgaagaacgtggattacgccgccttcaaggaaagccacccccgctcgatcgtggtgctgccgccgctgaacaactcgccggacgtgaaggccacttacgccctgctgtcgcaggccacgcagccgctggccgaatccggctactacgtgctgccggtcgcgctggttgacgagacctttcgccagaacggcctgacgataccgggcgacatccacgcggtggcacccgcgaagctgcgcgaaatcttcggcgcggacaccgcgctgtacatcaccgtgaccgactatggtccgaagtaccaggtcgtcagcagcaccaccgttgtcgccgccgaagcaaagctcctggacctgaggacgggcaagacgctctggaccggacaggcgtcggctgccaacaatcagtcgggtaacgctggcggtgggttgatcggcgcgctgatcggcacggccattgcacacgcaatcagcagcgtgtcggatgccgcctatggggtggccggcaggactagccagcaactgctctcggcgggtacgcctggcggaatcctgtatgggccgcggtcgccgaagtacggcacggactgactattatggccctggtttgtgagagggccggcctgccgtagttcgcgcgggcatcccccgatgcccgccctccgtcccccctaaagtcctgcccctcaggcgccgttaacgctaccaggcccccgatttcccaaacaacacccaattcccccgccttttcccatgaatgggaaggctgtcccgcttcgataatccctgctgacgaatagcggcctgccgcttcgcacggagcatggatgtccgaagaaagcgacctcgagaaaaccgaacccgcctcaccccggcgcctggaaaaggcgcgcgaggaggggcaggtagtgcgttcgcgcgagctcgccacgttcgtcatgctgatcgccggcgtgaccggcctgtggacgctgggcggccatctgggccgcagcctgaaccaggtgatgcagggggcgctgcgcttcgagccggcaacggcgttcgatacctcgcgcatgctgtcgcgctttgccatgatggtgtgggacagcctgctggccttcctgccgctgctgttcctgttcggcgttgcggcgctggcggcgccgttgctgctggggggctgggtgttctcgggcaagtccttcgcgccgcagttctcgcgcctgtcgccgctggcggggctgggccggatgttctccgcgcattcgctggtggagctgctcaaggccgtggccaagtcgctgctggtgggcagcgtgggcgcctgggtgctgtggcggcgcctgcccgaggccatcgcgctgatgaatgcgccggtgcaggaagcgctgctgcacatggtcgacctggtcatgtattgctgcctggtggtgtcgctgtcgctgctggtggtggcggccatcgacgtgccgtggcagtactgggagttcttcaagaagctgcgcatgaccaaggaagaggtcaagcaggaattcaaggaaagcgagggcgacccgcatatcaagggccgcatccgccagcagcagcgcgccatggcgcgccgccgcatgatgaccgaggtgcccaaggccgacgtggtggtgaccaaccccacccactttgccgtggcgctgcgctatgaggaggggcgcatgggcgcgccgcgcgtggtggccaagggcaccggcgatattgccgcccgcatccgcgagctggctgcagagcaccgcgtgccgctgatgtcggccccgccgctggcgcgtgcgctgcaccgccacgtggagctgggccaggaaatccccgccggactgtataccgccgtggccgaagtgctggcctgggtctatcaactgaagcactggcattactcgcagggcccgcagccgcaggcacccgcggacctgccggtgcccgatgaactcgccgtaccggaaatgcgcgaatgaacgctctgagcaacctgttcaacctgcccggcctgcgctccgccggccagctcaaggccatgaccgggccgctgctgatcatcatgatcctggggatgatgatcctgccgctgccggccttcgtgctggacctgctgttcaccttcaatatcgcgctggcgatcatggtgctgctggtcagcatgtacacgcagaagccgctggactttgccgccttcccggcggtgctgctgttcaccacgctgctgcgcctgtcgctgaacgtggcctccacgcgcgtggtgctgctcgaaggccataccggcccggacgccgcgggcaaggtggtggaggccttcggccacttcctggtagggggcaacttcgcggtcggcatcgtggtgttcgcgatcctggtggtgatcaacttcatggtgatcaccaagggtgcggggcgtatcgccgaagtcggcgcgcgcttcatgctggattcgatgcccggcaagcagatgttgatcgatgccgacctgaacgccggcctgatcgacgaggccgccgccaagaagcgccgcgccgaagtggcgcaggaatccgacttctacggcgcgatggacggcgccagcaagttcgtgcgcggcgatgccgtggcgggcctgctgatcatgttcatcaacgttgccgccggcatggtggtgggcatggtgcagcacgacctggacttcggcaccgccgtgcacaactacacgctgctgaccatcggcgacggcctggtggcgcagatcccggcgctggtgatctccaccgccgccggcgtgatcgtgtcgcgcgtgtcgaacgagcaggacgtgggcgagcagctcaccggccagctctttgccaacccgcgcgtgctgtacctgaccgcgggcatcatcggcctgatgggcatcatcccgggcatgccgcattttgccttcctgctgctggcgggcgcgctggtgtggatgggccgttatatgtcgcgccgcgccgccacgcaggagcaggtcaagcagcgcgaggagcgcaccccggcggtggcgcaggaatccactgaagcgagctgggacgacgtcacgctggtcgacccgctcggcatggaagtgggctaccgcctgatcacgctggtggaccgcgcgcaggacggcgagctgctgggccgcatcaagagcatccgcaagaaggtggcgcaggagatcggtttcctggtgccggtggtgcatatccgcgacaacctggagctcaagcccaacgcctaccgcatcacgctcaagggcgtggagatcggccgcggcgaagccatgccgggccagtggatggcgatcaaccccgggcaggtcagcggcacgctgcctggcgcggccacgcgcgatcctgccttcggcctgccggcggtatggatcgacgcgggcatcaaggagcaggcgcagtcctacggctataccgtggtcgatgccagcaccgtggtggccacgcacctgaaccacctgatccacatgcacgccgccgagctgctaggccgccaggaagtgcaggcgctgctggaccgcatcgccaaggactcgcccaagctgaccgaagacctggtgccgaaggccatttcgctgaccgcgctgcagaagatcctgcagaacctgctggacgaaggcgttcccatccgcgacatgcgcaccatcctggatgtggtggccgagcatgcgcccaagatcagcgacccgaacgagctgaccgcgatggtgcgcgtggcgctgggccgcgcgatcacgcagcagctgttcccgaacaacgccgacctgcaggtgatcggcctcgatgccggcctggagcgcgtgctgtcgcaggcgctgaccaatggcggcgggatcgagccgggcctggccgatgcgttgctgcagcagacccagggcgcggtcacgcgccaggagcagctgggcatggacccggtgctgctggtgccgtcgcagctgcgcccgctgatggcgcgcttcctgcggcgcaccatgccgcagctgagggtgctgtcgcatgccgaggtgccggacaaccgcaatatccgcatcaccgccatgatcggcgcgtgaggagtcatagatgagcgtagccaagtttgtcgcggccaacggccgcgaagccatgcgccaggtgcgcgaagccatgggcccggacgccgtggtgctgtccaaccgcaccgtcgagggcggcgtggagatcgtcgccatgcgcgatgcggatctgggcagcgtgcaggccacggcgcaggtctacgtgccgcccgcgccggtggccgagcccaccgccatcggcgacctgcgcggtgagctgcaatcgatgcgcgcaatgctggagcgccagctggccgggatcagccctgcccaaagcgcggttccaagcgcggcagcgcacggcgtggccgccagcgacccgctgcgcgaatccctgtttgaatggatggtcggcgccggcttctccgggcagctggcgcgcacgctgctggcgcggctgccgctgggctacgaccgccccgcggccatgggctggatccgcaccgaactggccagcaagctgccggtgctgggcgatgaggacagcctgttcgcgcaaggcggcgtgctggcgctggttggccccaccggcgtaggcaagaccaccaccacggccaagctggcggcgcgcttcgtgctgcgccacggcgccgacaagctggcgctgctgaccaccgacagcttccgtatcggcgcgcacgaacagctgcgcatctacggcgacatcctgggcgtgccggtgcatgcggtaaaggatgccgccgacctgcgcttcgcgctggcggcgatgaaggacaagcacctggtgatcatcgacaccgtcggcatgagccagcgcgaccgcagcctgtcggaacagatcgcgatgctggccggcgtgccggcgccggtgcagcgcgtgctgctgctcaacggcgccagccacggcgataccctcaatgaagtggtgcatgcctaccgtcatgacgccgcgccggatgggggcggcatcgacggctgcatcatcagcaagctggatgaggccacccacctgggctcggtgctggacgtggtgatccgccaccgcctgccggtgttctacgcctccaccggccagcgcgtgcccgagcaccttgagctggccaacagcaccgcgctggtggagcgcgccttcctgacgccgcgccgcggttcggtatttgccgatgcggacgccgcacgccggcgcagcgccggcaccgatgacgaggcccccgcgcgtggcggtgccgacgaggtgctgcgctcgctgaccgacagcgccgacgcgctgagccagtgcgtggcggaactcaatggcgcgggcctgggtctggacctggcgcgctcgctgtggcaacagcgcagcgccggcgccccggccctgcgcgcgatgtcgcagcaggtgcgcgaagcggtctgccgcgacgtgacccgccagtgcgagcagtacgtgctggccagcgccgccacgctgcaagtggccgtgcccggccgccgcacgccgcagccgatgcagcacacgctgtggctcgccgaccgcgacggcatgccgctggccgccaccgtgaccccgaccggccgtgccggccagccgttgggcgaggccgagtccgatgccgccagcctgcgcgccgccatgagcgccgcgcgcaaggtggtcaacctgatcgatgccgtaccgaccgccgccacgctggcacgctggcagcaggccggcgagcgctgggtggccagcgcgcgcaagaccgcgcgcgtggtcagcgccggcgccgcctggaagctcgatgcgctggccgacacgctgaccttccacgccgtgggcgaggacaccgtgcgcgagcgtgaagccgtgcgctggctggccagcgccgaagtgcgcgtgccggacagcccggtgcgcggcaagggcacgcccgaaggcggcatcgatgcctgcctggtggtggcccgcctggccgaccgcgccaccggcgaactgctggatacccgttacctgctgtgcgacccggcgctggcgcaagatgccgcgcaggtggcgcgctgggccttgtggaccgacgcagccgatgcgcgcctgcgcacgctgcgccacgccatcgaccacttcgcccaggacgccgaaagcggccacgccgccggcgccgcgctggccgcactgcagttgggcctggcggtgctgcgcctggaacacgcgccgaccgcggccgcgcccgccttcctcgcgcgcctggctggccgcacggtgcgccagggcgtgccggtgccgggcacggtgctcaatgaaggcatgggccgcatgctggcattgctcgacgtgctggaaaactatccgggccgcggcaccgccgtgcccgctgaagcgatggaggtgttgcagtgagcgccctcgccatggaccaggccgagagcctgcgccggatgctggcgccgcgcacgacgcgccgtatcgccgtggtcgccagcgaacgcggtgccggcgccaccaccgtggcgctgggcttgtcgcacgcgctggccatgcagggcgaacgcgtgctgctggtcgacgaagacgccgccgcggcgtgcgccacgcggctgtccggcgccaggcccgccggcaccctggccgatgtcagcgcaggccgcctgtcgctggaagctgctgcaggcaccggtcccggtggcgtgctgtcggtgctgccggctggccggcctgtgccgggctgcgccttgccggctgctgccgcgagcggctttcgcagcgtgctggtggatgccggcgtcgatgccgacggcgcgctgtcgccgctcgcgggcggcgcgcacaacgtgctgatcgtgatgcggcctgaactggcgtcgatcaccgccgcctacgcgtgtatcaagcgcctgcaccacctgtatgcctggcgccagttccacctgatcgtcaacatggcggcgagcgaggctacggtgcaggcgatcctgcgcaacctcgcgcgcacggccagccagtacctgggcgttgaggcgttgtgcgcgggctggctgccatccgacccgctggtggcgcgcggcgtgcaactggggcgctgcgtggtcgaggcgtttccggcggcgccggccaccaccgcgctgcgccgcaccgccggcagcatcggtgcctggccgctgcgcgcggacacgtccacccctgctcccgcacccgccatggcctgagcctgccagccatgccatccaaccgaaccagaccctgagccagcccccgccgcacgttgcggcggtccagcaatccagcattcacgagaattgcaccatgtacacgatccagggaaagctcgaacaggccgatgtggtcaaggcgcatgcacagctggtgcgccgcatcgccctgcaactggccgccaggctgcctgccagcgtgcagatcgacgacctgatccaggccggcatgatcggcctgctggatgccgccaagcgttatgaagacacccacggcgcgcgcttcgagacctacgccagccagcgcatccgcggcgccatgcttgacgaggtgcgcgccaacgactggcagtcgcgcagcctgcgccagttcacccggcgcatcgagcgcacgcagcgcgggctggagcagaagctcgggcgcgcgccgctcgactccgaagtggccgaggccatggagatggcgctggacgaataccagctgctgctcaatgaggtctatggctgccagctgctgcactacgaggatttcgagcgctccggcgaagaagacttcctggaccggcaccttggcggcagcgatgacggcaacccgctgaccgtgctgatggaaagcggcatgcgcgaggcgctgatccgcgccatcgaccggctgccggagcgcgagaagctggtgctgtcgctgtgctatgaccaggagctgaacctgcgcgagatcggcgcggtgctcgatgtgaccgagtcgcgcgtgtgccagatccgcggccaggcgatcacgcggctgcgcaaccagctgcgcggcttgctgtgatgcaggcgctgggccgcgccgcgcgcggcgcttgctggctgctggctgccgcatcggcctgcgcctgggccgccatcgagggcggcacccgccacgcctggaccggatcggtcaacgggccggcactccacggccgcggacagcgcgcggtgtcgccgccgatcctgcccaccggcgtcttgccgcagtcagaaggggtcatcacgtcggtgcgctggcgctacagcttcgccaagaccccaccgctggaactgcaagcctatctctgcaatgcccagcgctgcgtgctgctgccgcaggcggaaggcaagaccgatgcgttcttcggggatgatgccaccaagggctttgtgtttgcgttccgggtgccggggcagggcagcctggtgccggtgctgcaggggcgcagcaatgaggtggtggtggggtttaggtaggagtgaatgttccgttctttcgtcacttctgaataagtgacgaaagaacggaacatctggcgatcgcctcaacccgccgccagactcaccccaccagccccggccgccgccttcccatccttcccatacaaccccgcatccccgccactatgctggcgcagcgcctgaatggcttcgcgggtgaaatcgaggtgggcattgacgacggcgccgttcagggcgttgccgtcgcgcgcggtgcgcgcggcgaagatcagctggcgccaggcgtcggccacggccgggtcgacctggcggccgagcagctggccttcggggccggcgcgcaggccaagcgcgcccatctgggcttcgcgggccttgagctggcgggacagggcctggcccagttcaaccttgcgcgtcagcagtccgctcagggactggaagtcgccccgcttgagggcgtcgcgctcttcggcgaggagttggccgaaggcctggatgccttcggtttcgcgctgcagggactggatcaggctctggttcatttgggctagcggggttcggcctggccaagctcgcgcagggtcgcgagcaggccgtcggcaatcttgcccgggtcgatcctgatccggccctcggcgatggcctggcggatctcttcgaccttggcggtgtcgatatcgtcgtccgtgggctgcgtcaggcgggcgctgatgtcgcgcacctgggcggccagcgggctgacgctcaggccggcggacggcgccgcggcgctggccggcgcggcctggggccgggcggcggcagcgtccgcgggggcgtcggcgggccgggacgaggcggtgtggttgatcttcacggggcgttccttgctggtttcctatggcattacggtagcgccggcgaattctttagggcgctcgccccgatttcgccgcgcagcgatgtcggcggcattttcgcatgccgcccgccacgggtttgcagtcttttggccacgatcaaggcactttcggcgggctactgcagcaccacggtgtcgccgctgcgcaccagcccgttgaccacctggccgctgcgcaggcgcacctgcacggtgttgccagtggcggcatcggccagcaccttgccttcgctggtgatctggaaggcatcgccttccacggccacggtgacggtctggccctggcgcacggcgatggccttgcgcagcaggtcagaccgtatcggcgagccggcggcaatacggttggcggtgaccgcgccggcaagctgcgccgggtcggtgatcaccgcgcgcggcagcgtgcccaggtcgccctggcggacttcgatatcggcctggccgaccggctcgcccgggcccagcgcgcgcgcggcgacgtagtaatcggtcagcaccgacacgcgcgcctgcatgtagcgcacccacggccgctcgccgccgcagcgcacgccgacggagacgcggccccaaggcgacgtgccggcgggcaggaacgggtcgggcgcaaggcaatccggcgcgcgcccacccgaaggcggcgccacctgcacgctgaccttgcccggcaggccggcggtctgctgcagcaggaagcgttccacggcaacgcgcgcggggtcttcggcaaaggggctggcagcggggttggcagcataggcagcctgctgctggccgtgcgcggccgccgcctgcatggcgacgggcatgacctgcgccggcgcggcaccggcggcggcgggcccaagcaggcaggccgccagcagggcttgcgccaggctgcgggcgttgcggcgattctgtttcatctggacttcccggcaagatcggcacggcatgcacggcatgcctggcgcaccgccccgtgactggccgcgcgccccgtttacatctgtcatcggggtcccattgtaggcagcccctcgcgcgagggcgggccgaaatgcatggatttcccgtccttattcatccgattggcgtgacaggtcgccgcctaagatggcaaccctgaagaaggtcgttcgctccgttcacgtgagcagggagatgccagatgattgacagactcgacgcggcactacgtttccagcaggaagcgctgagcctgcgcaaccagcggcagtcggtgattgcctccaacatcgcgcacgcggacacgcccggctacaaggcgcgcgattttgatttctccagcacgctggcccaaagcgtcgaacgcggccatcgcaatgagggcatgtcgctgtccaccacctcggtgcgccatctgcccgcgcaggccccggggcgcgaggaattcgacctggcttaccgcatcccgctgcagtccagcgtcgacggcaacaccgtggaaatggatgccgagcgcgtggccttcgccgacaacgccgtgcacttcgagtccggcctgacggtgatgaattcaaagatcaagaccatgctggccgccatccagcaatagatcgagcagtaagggagagagcgcatgccggcaatgaacatcttcgacgtcgcgggctcggccatggccgcgcagtcgcagcgcatgaacgtgaccgcttccaacctggccaacgccgacagcgtggtcagccccgacggccaggcctatcgcgccaagcaggtcgtgttcggcatggcgcccacgccggggcagacggacatcggcggcgtgcaggtgcgaggcgtgtcggaagacccgtcgccgccgcgcatggtgcacaaccccacgcaccccatggccaatgcccagggctacgtggtgatgcccaacgtcaacccggtggaggagatggtcaacatgatctcggcctcgcgctcctaccaggccaacgtggaagtgctcaataccgccaagaacatgatgctcaagacgctgacgatcggccagtgacaagcctcggcctgtatcggcaacgcctccaccagcacgcacacaacgaaccgacatgacaaccacctccgcggtaggcagcaacacccagggcatcaacgacgccctcaagagcggcagcgccagcgcgtccgagctgcagaacaacttcctgaccatgctcgtcacgcagatgaacaaccaggacccgcttaacccgatggacaacgcgcagctgacctcgcagctggcgcagatcagcacggtcagcggcatgcagaccatgaacgcgacgctgtcgcagttgctgtcgcaggtcagcgccagccgcgccatggactccgcggcgctgatcggccataccgtgatggtgccgggcaagcaggtgtcggtggcaggcggcgtgccgggcaagtttggcctggacctgccgtcgaccgcggatgcggtcaccgtcgacgtgctcgacaaggacggcaacgtggtgcgcaccatcgacatgaaggggcagaccgcgggcgtgcacaacgtcgcatgggacggcaagaacaacgccggcgcggccgtggccgacggcgactacaccttcaaggtgaccgccaccgccaacggcacctcggtgcagccggtggcgctggtctacggcaaggtccagagcatcagcggcgacgccagcggcgtgctggtggacctgggcgacggacagaccgcgaacgtcgacgacgtacgccgcattctctgaaacgcaggtgccggcagcgcacaggcgccggccggcttcaacgaccaagcaaaaaggaagcaatcatgggtttcggtcaaggggtaagcggcctgaacgccgccgcgtccaatctggacgtgattggcaacaacatcgccaacgccaacacggttggctacaagcaatcggcagcgcagtttgccgatgtctacgcaggcaccaagatcggcctgggcgtgcgcgtgaactcggtggtgcagtcgttcaaccagggcaatatcgaagcctcagggcgctcgctggatgtggctatcaccaacggcaacggcttcttccgcctgaccagcccggaaggcgcggtctactactcgcgcaacggccagttccagcgccaggaagacggccgcatcaccaatatgcagggcctgcaggtgaccggctatccggcgggcgtggccggcggcgcgggcgtgcagccgcagccgctggtgatcagcaacgcgcagatggagccccgcgctaccagcaacatcaccgccaagttccagcttgactcgcgcgccaccgtgccgacgcaggccttcgccagcgcggccggctcgccgccgaccagcaatatgttcaactacagcacggcgatcaacgtctatgactcgctgggcaacaagcagcagctgatggcgtacttcgccaagtcggcgggcgccccgaccgtcgccggtggcaccgactggcgcatgtatgtgaccgacgtcaacggcaatgccgtcggcggcgcaccggtcacactcgcgttcgacaacgccggcgcactgcaatcgccggcggccggcgccatcaccctgagccagccggccgccaatggcgcgcaggctatggcgatgaagctggacctgaccggcaccacccagttcggcgccgacaacgacgtcaagcagctcagccagaacggctacacctcgggcagcctgctgggcttctcggtcaatggcgacggcaccatcaccggcaactattccaacgagcagaccaagccgctcggccagatcgtgatggccgcattcggcaacgtcgaaggcctgaagccggagggcgacaacgtgtggtcggccaccggcgcctccggccaggcgctggtcggcgtggccggcggcagcatgggcacgctgcgctccaatgcggtggaagcttccaacgtggacctgtccggccagctggtcaacctgatcgttgcgcagcgcaactaccaggccaatgcgcagaccatcaaggcgcaggacacggtcatgcagaccctggtcaacctgtgaccgctacgctgagctgagccgccgccatggaccgcatgatctacaccgccctgtcgggcgccaagcagatactcgaccagcaagcggcggtatcgaacaacctcgccaacgtctccacgccggccttccgcgcgcaggtcaacctgtaccgcgcggtgccggtggtcgggccggaggcgggcacgcgcgcgtttacggtggcctcgacccccggcgccgacatgcgcgccggcccgctgacctacaccggccgcacgctggatgtggcgctgcaaggcaatggctggctggtggtgcaggcaccggacggcactgaggcctacacccgcgccggcgcgctgcaggtggcgcaggacggccaggtgcagaccatctccggcctgccggtgatgggcgatggcggtccgctggcggtgccgccgggctcgcaggtgaccatcggcaccgacggcaccatcaccgcgcgcggccccggcgaagcctctgccggcctggcgcaggtgggccggctgcgcgtggtcaacccgcccaacgacgccatcgcgcgcggcgatgacggcctgttccgcctgcgtcccggcgcgcagccgctggaggccgatcccaccgtgcgcgtgatctcgggcgcgctggaaggcagcaacgtcaacccgaccgaagccatggtcgagatgatcgccaatgcccgccgcttcgagatgcagatgaagatgatccagggcgccgacggcaacgagcagcgcgccaaccagctgctctcgaccaactgacctgaatgactgaccggcacggcgcaccgtgccagcaccaacgcaaggaccaccatgatccgctctctctggattgccaagaccggccttgatgcgcagcagacgcagatggacgtgatctcgaacaacctggccaacgtgtcgaccaacggcttcaagcgcggccgcgcggtgttcgaggaactgatgtaccagaccatccgccagcccggcgcgctgtcgtcggaccagaccacgctgccgtcgggcatgcagctgggcaccggcgtgcgccccgtggccaccgagcgcatccacacccagggcaacccgcagcagactggcaatgccaaggacgtggccatcctgggccagggcttcttccaggtcgcgctgcccgacggcaccaccgcctacacccgcgacggctcgttccaggtggaccagaacggccagctggtgacctccagcggcttcgtgatccagcccgccatcaccatcccggccaatacgctgtcgatgaccattgcgcgcgatggcaccgtgtcggtgacgcagcccggctccagcgccaacgtgcaggtggggcagctgcagctggccaccttcatgaacccggccggcctggaaagcatgggcgagaacctgtacgtgcagaccgatgcctcgggcgcgcccaacaccaccgtgccgggcctgaacggcgctggcgtggtgcagcagaactacgtggaagcgtccaacgtgaacgtggtggaagagctggtcagcatgatccagacccagcgcgcgtatgagatcaacagcaaggccgtgcaggcatccgaccagatgctgcagcgcctgtcgcaactgggttgactggtgtgaacatggccaccttgctttcccgcctgggcgcgcatgcgctggtttgcctggccggcgtggcaatgctggccagcggcggctgcgcgctgatgccgcgcgagccgctggtgcaactgcccaccaccgcgcgcgcagagccgcggccgatggggccggcttcgggctcgatctaccagtcgtcctacgccggcaacccgctgttcgaggaccggcgtccgcgcaatgtgggcgacatcctgacgatcctgataaccgagaacgtcaacgccagcaagaattccggcaccaataccagccgcaccggcaacaccgcgctggcgttcgatgccgtgccgcgcgcgctcagcggcctgttcaacagcagcagcaacgccagcatcaacggcgccaacaccatgaaggccagcggcggcgccagcgcggccaataccttcaacggcaccatcaccgtgaccgtgctggaggtgctcaccaacggcaacctggtggtctccggcgaaaagcagatggccatcaaccagggcgccgagttcatccgcttctccggcgtggtcaatccgcgcacgatcaccggcgacaacgccgtgctgtcgacgcaggtcgccgatgcgcgcatcgaatacaccgccaagggtgtgatcgacgaagcgcagaacatgggctggctgcagcgcttcttcctcaatgtttcaccgttctgaccgcgccatgtctgctccgatgctcgcccgtttcctgtcccgcctgctgcgcctgagcgtgatcagcctggcgctgggcgtggcctttggcgcctttgccagcgtcgccaaggccgagcgtctgaagaacctggccacgttccagggcgtgcgcgagaacccgctggtgggctacggcctggtggtcggcctggacaacaccggcgaccagaccatgcagacgccgttcaccacgcagagcctgaccaacatgctctcgcagctggggatcacgctgccggccggcaagaacatgcagctcaagaacgtggcggcggtgatggtgaccgcctcgctgcctgcgttcgcgcaacccggcagccagctggacatcgtggtgtcgtcgatgggcaatgccaagagcctgcgcggcggcacgctgctgatgaccccgctcaagggcgccgacggccaggtctatgccatcgcccagggcaatatgctggtgggcggcgcgggcgcgtcggccaacggcagcaaggtgcaggtcaaccagctggcggtggggcgcatcgccaatggcgcgatcgttgagcgcgcggtggcgccgttccagccggatggcggcgtgctcaacctggaactgaaggacaccgatttcggcaccgccgagcgcgtggtggaagccatcaaccgctccatgggcggcggcgttgccgcggcgctggacgggcgcgtggtgcaggtgcgtgcgccggcctcggcggccgcgcgcgtgggcttcctggcccgcatcgagaacatcgacgtgaccccggccaaggccgcggccaaggtgatcctgaacgcccgcaccggttccatcgtgatgaaccaggccgtgaccgtggaagactgcgcggtggcgcacggcaacctgtcggtggtgatcaacacgcaaccggtgatcagccagcccgcgccatttagcgaagggcggacggtggtggcgccggtgtcgcagatcgacatgaggcagcagggcggctcgctgcagatcgtcaaggcgggcgcctcgctggccgccgtggtcaaggggctgaacgcgctgggcgcaaccccggccgacctgcagaccatcctggaagccatgcgcgcggccggggcgctgcgcgccgagctggaagtgatctgaccatgaacacggcacgacccccgcaggcggcggagctgacgcagcgctttgcgctggacacgcagggcttcgaggcgctcaagcacagcgcgcgcggcggcgccgacgccaatacgctgcaagccgtcgccaggcagttcgaggcggtgttcacgcagatggtgctcaagagcatgcgcgatgccaccccgcaggacggcctcttcgacaacgagcagagcaagctctatatgtcgatgatggaccagcagcttgcgcagcagatgtcgtcgcgcgggatcggcctggccgatgtgatggtgcggcagctggcgcgcgccacgggcacgccgatgccggccggcatgagcgccatgagcccggccgagtcaggcaaggcggccgatgccgagatggcaagattgctcgacagccgcggcgccggggcgatcccggccgacgccggcgagcaggccgacctgccggcgatcggcaccatcgtgccggggcagaactggaatcccactgccggcctgcgccagtaccagccgcagtggtacgcggaccgtggccagggcgaggacaggctgggacggttgccggacgacgcgccgtcccacgtcagcgcctttgtcgcccgcatggccgggcccgcggaagccgccgcgcgcgccagcggcgtgccggcgcggctgatcgtaggccaggccgcgctggaatccggctggggccagcgcgagatcacgcacgccgacggctccaccaccttcaacgtcttcggcatcaaggccggggccagctggaaggggcgtgtggccgagatcaccaccacggaatatgtcgacgggcagccgcagaaggtgcgggcgaagtttcgcgcctatggctcgtatgacgaggcctgtgccgactatgcccgcctgctgacgaacaacccgcgctacgcgggcgtggtcagcgcggcgtcggctgaagaggcggcgcatggcttgcagcgcgcgggctatgccaccgatccggcgtacgggcacaagctggtgaagatcatgaagaaggtcgcagcctgagggcagggggaagccagcggatctggcgaagatcacttccacacctaaagtcccgcccccacccagccgataacttccacatccaccaccgccggccctcgccgcggtagtcccatcaatccggggtcagagcacaatgtctctcttcagtattggtctttccggcctgaacaccgcgcagaacgcgctgacgacgaccggccacaattttgccaattcggcgaccgaaggctattcgcgccagaataccatcgtggcctcggccggcggccagtacaccagccagggtttctatggcttcggctccaacaccaccacggtgatccgcgtctatgacgagttcctgaccggccagctgcgcggcgccacctcggccagcgcatcgctggcggcgtactcggaccagatcgcccagatcgacaacctgctcgccgaccagaagggcggcctggcgccgctgatgcagaagttcttcgcggcggtgcaggcagtggctgacaccccggccgatccggcagcgcgccagggcatgctgtcggcggggcaggcgctggtggggcaggtgcgctcggccagcaactacttcaagcagctgcaatcgggcgtcaatgagcaggtcggcaccgccgtcacgcaggtcaacgcgtacaccaggcagattgccaacctgaaccaggaaatcacccgcctgaaggctgcctccggcggccagccgcccaacgatctgctggaccagcgtgaccaggccgtggccgagctgaccaggctggtcggcgccaaggtggtggtgcaggacagcggcacctacaacgtcttcgtcggcaacggccagccgctggtgatgggcaatgacgcgtacgagctgaaggcggtagcctcggcggccgatcccaaccgcaccgtggtggcctacaccctgcccaacggcaacgtgttcgagagcgagccgggcgcgatcaccggcggttcgctgggcggcctgctgcagttccgcaccgaatccctggacgcggcgcagaacgccatcggccggctgtcgctggcaatcggccagagcttcaatgcgcagcacaagctgggcatcgacctgaacggcgcgattggcaccgacatgtttgaactgggtagcgccacctcgatccccaacgccaacaacaccgtgaagaccacggtggcaacgaccaggatcgacaatgcctcggccctgaccaccagcgactacaagctgcagttcgacggtaccaactacacgctgacgcgtctctccgacaaccagcaggtggtcacgccggtgcccgccggcggcgccagctacccgctgcagttcagcgccgacggtttcaccgtcgagatcaatgcggcgatgggcaccaacgattcgttcacgatccagcccacgcgcaatgccgccaccggcttcgacatggcgatcagcgacccggccaggatcgccgcggcatcgccggctcgcgccgacgcggcggcgtcgaacaagggcaacggcacggtcagcctgggcaaggtcgcgcccggctattcgctgctggctggcacgatcaccgccaggttcgacggaaccacctatgtcttcagcgatgccaacggaccgctcgcgacccagccggcgcccgtgtccaacggcagcaataccgactacaccctcaacggcctgaccttcagcttcggcggcacgcccgcgacgggcgacaccttcacgctgagcagcaacgccggcgcggtcaaggacaacggcaacatgctggcgctggccaagctgcagaacgccaagaccatcggcggtgtgtccagcttcagcgagggctatgcccagctggtcaacgacgtcggcacgcgcgccaagtcggtcaagatcgcctcggcctcgcaggacagcatcaccacccagatcaagaccgcgcagcaatcggtgtccggcgtcaacatggacgaggagaccgtgtcgatgctgcgcttccagcagctgtaccaggccaacgcccgggtgatccagacggccggcacgctgttcgacaccatcatcggcatcggcaggtaagctgcggcacccacaagcgtcagcagagtcagaagaggtaaccaatatgcgcgttgcaagctccaccctgtaccagcaaggcctggcttcgatgaactaccagcagggctcgctgctgcatatccagcagcagctaggcaccggccgcagcatcctgacgccgtccgacgaccccgtcggcgccacccgcgcgctgggcgtgagccaggcacaggccgtcaacggccagtacgcaacctcgcgcaagcaggccaatatcgcgctggccgcggaagaaaacgcgctgcagtccgtgaccacggtcacgcagaacatccagacgctgctggtgcaggccggcaacggcaccatgagcgatgccgaccgcggctcgctggccacggcgctggaaggcctgtacaaccagctggtgggcctggccaactccgacgacggcaacggccagtacctgtttggcggcacccgctccggcagcgcgccgttcacgcagagcaaaggtccgggcgcctacatcggcgacaacggccagcaactgctgcaggtcgatgtggcgcgccagatgcccgccggcaacaccgggcgcgaagtgttcatgagcgtgaccggcggcgccggctatgtcgtcaagggcaatgccaacaacaccggcagcgccacgttcggcacggtgtcgaccacgaacccgagcgatcccgactatgggctctcgatgcaggtcacgttcgcggccaatgccagcggccagatggaatacaccatcaccgacctgtcggcaggcacgacccccgcaccggtcgtgaagggccccatcgcctacacgtcgccagcccatatcgacgtcgccggcgtcagcttcaacgtgaccggcgatcccaaggacggcgacaccatgaccatggctcccgccagcgaggccggcaccgacatgttcgccaatctgcagaccgtgatcgacacgctgcgccagcccacccccgacagcagtgatcgggcgcatcttggcaacgtcatctccaccgccacgcgccagttctccaactcgctcgacaacgtgctgaccgtgcgggcatcggtgggttcgcgcatgaacgagctcgatgcgttggatgatgtggggtccaaccgtgacctgacgtactcgcagacgctgtcgggactgcaggatctggattacgcgaaggcgatcaccgagtattaccagcggcagacggcgctgcagggggcgcagcagtcgtttatgcagattcaggggatgaatttgtttaagtatttgtaaggtgggtggggcggcggcctcaggtgtgttcttgtctagccggaacaaagtcccgcaaaaccccgaaagaagttttgcatccgcgggtagcagctccatttagcgacgtgcacgaaggcggacacgcaggagccatcaggagatggcaccgtcctcggcctgcacttccgcctggccccacgtaacccgggggacctttctatttttccgaagcgcaagatcgccggctcttgccaagcgccttgcccgctccggtgccagcgtgaacggcttacgcgagcacgtgaaacgggcgctggaaggctacggacccggcgtcttgcccgagcggggcttccgcagaaggtggaaggtccagcagcgcgcgcacgtcccgttctaccgtcgcgagcgaagcggacctggacagggagcgggcaaagcggctgtcgaggcctggtggcagacgcagccacatattgtccgagaccagcagcaggcgccttggcttcagcgccaggctggccaggcgcagcaggtgccagccgtcggcaagatccggcggcatgccgaacacaagcaatgccggagccggcaggcgcgcattgcgtgccgccagggcgtccgtttccacgagttcgacccggccaatgcccggcatttctccgagcaggcgcatgactccgtgccggtacaccggcatgtcgtcgatcaccacggcatgtgcctcgcggttgcgccccaggacttgttcccaggcggccgctccacggttcgtccagctcatccttgtttcctccggtttgccggcgttggcttcgtggccagcgccctgcaccagtaccagcaagggcaatgccaactctggcaaggccgcctcgtgcaattgcgcacaggcgcgggagccaggcccgctgcgggtttccgggaggttgacgcggacctgccggcctttgcggacgactggcagccgcggtggggtgttacgtgtaacgtaacgtgttacgcgaccagcctcggccggacgccggaggctgtcgaaaccagcgtcccgcgcagagcaggacgccaatgaccgaaagctggtgctcaattgcgatcggtctcaattcgccttaacctgtcacatagccccaccctggaaccgcgcgatgcaagcacatcccttacgcctctctcccggcgacgatctgcgtgccgcactcgaagacgtgctgagtcggctcaagttgcatgcggctttcgtcatccagggaatcgggagcctcagcgttgcccaattgcgatttgccggggcggaagacgctaccgaactgcgtggcgatctggagatcctgacgctcgccggatccctgtcaccggatggagcgcacctgcacatgtcggttgcggactcgcgaggtcgggtgctcggtggtcatgtggcgcgcggttgcacggtccgtacgactgccgagatattgctggcgctgcttcccgaacatcgtttcgcccgtgagtacgaccagagttcagggttcatggaactggtggtacggaacgagccgccgctggattagattcgaagcaacccgggcagcgtggatgaatgaggtcgttcggcccgtttcagccactcggtgcgagtgttcgggcgaccgccttacgcatgaagcctatgccttggcacacttgacgacggtatcgagcgtgcgagtggtgatgcccttcccgaacgagcgttcgagcaggcgcatgaacaccgggcctttcttcggatcgggcacgtaggcgctgaagacctccgtggcattggccttgacgatgcttgcgccgtcgcgctcgatgggcagctccacgtctggtggcaccgggttgcggagaaaggtgacaacccgcttggccgaaggtgcaaggctgagctcggcgaaagggtccgagtcgatgaggtcctggagatagcgggacggccggacgaaggtgtcgaagctgtggcccagttcagactgcatcgccttctcggcgcgttgctccaggctggccagtgacgacgatcgcgcgttgaacacgatgttgccgctggagagcagggttttcacttcggagaagcccgccgcctcgaagcagcgcttgagttcgggcatccgggcgttcatcgggctgacgccgcgaagaaaggcaacgtatcgggacatggctatctcgtgattgctggcaaaccgccacacagctcgctcgcggtcaacggtaaacaggctggtcaatgatagacgagtgccggccagcggttcagcccacccacgtgtcagcgcatggccgctatgaaaaggggagaattaacaatctcacaggagatggcgaaacgacctgctagcgcgcagttacggactctcgagccgggtacttcatggttcagtgcgcgaagtacccgcacgagcggcagtccgatggcgcgagttgcgcctgcaacgaaaatcttcatggcttttctccattgagctgcgcaggctggcagcgcagcgcaaagtcgacgacacagcggagcggagtgacgccccgttctgattcggtgaacgccattttttctggtcctgggacttaaaaaagcaccaaaaagctgaagaattcgtgtaccacccctcccatgtgctgtcagtgcctttgcgctaggagaacttgctgatcaggtgttgcaagcgatcacaggcagccggcagctgctgttcaatcgctgtcgcaacaccaaggagcagtcccgatcgctgcgtagacgccgagcaataccaccccgacaacggggcgggcgcaaggccgtaggcataggcttcccgagcgatcgtcttgtcgtcggcgccatcgggaagcctcatcaccacggcaagtccggccggataggcctggaatcccctggacctcagcgcagccagcagtgcatggcttcggcctgcatagatgcgcttcatccgacgcaagtgtcggatatagtgcccatcccgcatgaattcagcagttgccatttgcactgccggtccgggcgctgaagcaaggcaggccacggcttcatcgaatcgggctaccagggaggccggcaccacgacaaatccaagccgcagcgtcggactgatggtcttgctgaaggacccgatatgaatcacccgccccgcacgatcgagtgacgccaatgcgggagccgcgcggcgtgccagctggagttcgcccaggtaatcgtcttcgatgatccaggcatccgcgcgtgtcgcccagtcgaggatctgcacccgacgagcgagcgacaaggtaggacccagaggcgcttgttggcccgcggtgaccaaagccaccgcggcatctggtgcgtgcgtttcaccgtagctgacatcaatgccttcttcgtttaccgggatgggaaccgttgcgagccgggaaatttccaatgccctgcggctgggaaaaaatcccgggttctcgacccatgccttccggccttcggcctgaatcactcgcagcgccacaccgagcgcccctgagcatcccgccgtaatgaaaatctgtgagggctggcattcaatgccgcgtgccagggccagatgcgctgcgatctctcgtcggagttcatgttcgcctcttgggtccggatacgctgcaggcgcttcgacttcgtcgcgtgccgcacgggctcgcagccgcgaaaacaatgtagccgggaagcagtccgatgccggcacgcccatttgaaagaccgcaggtccgggcaggaaatgctggtacagctcggatcgcagatcagactcgatggaacgcgcacgctccgtgatcgggctcgcgacggcagcatgctcagagactctggtcccccaagcgcgcgatgaaacgaccagttgtgcgtcggccagccgctcatatgcagtcttgacggtgcctcgggcaaccccgagttgtgcggcaagatctacccaggacggcagtctggcaccgggaacgagtaccccgttctcaatggcgccggtaatgccgagccgaatctgctccgccagtgaagttttcgacgcgcggtcaagcttcagatccaggagtcccatagcctctggtacatcaggaaattgaatttttggttcttttttatgaacctccgggagagcatgattctagcctcacaggagataaacatgaaacttcagcgcattcttcgcgctctcgtcgcggctacgagcatcgccttcaccggggctgccgctgcacacaccgttggcgatacggtcaagccgaatttctcccgggcgattcccaacatcccgggcaagtcgctcatcgccgtggaggtcctttatccgcccggaggcgcttcgcatcctcatacccatgccaagtcgtcattcatctatgcatacgtcgtctcgggcagcgtcgccagcaaggtgaacgacgagccggaacgcgtatacaaggctggtgagagcttcttcgaggagccaggcgcacgccatccggtgagccgcaatgcgagcaagaccaagccggcaaaactgctcgccgtgtttgtcgtcgattcagacgacaaggaactgacgatcaacgacaagtaggagtttgaaatgagactggattacaccaaggcatcgccaggcggtgtgaaggcatttggcggcgtgtacggctatgtcatgcagtcgggcctcgaagacgtcctcgtcgagctggtctatctgcgcgtgagccagatcaacgcgtgcgcttattgcctggacatgcatacccgtgacctgatcaagaagggcgctacgcccgagaagcttgcgctcgtgcaagcctggcgcgaagcggggccgttgttcactcaccgcgaaaaggccgcactcgcatgggccgagtcggtcaccctggtggcggacacacacgtgcccgaggaggaattccaagtcgcggccgcggcgttcaacgagaaagagctcgctgacctcacgatggctatcagcctgatgaacgcctataaccggctcgccatcagcttccggcgcgcccccgagtccgcactggccgccaaagactgatgcttgttgtccctcgggtgccgggtgaagtctgttgagaagcgcgcctttaggggcgtttcccttttgggggcacgtagcccccgagttgcgcttcgcagctttccattcagaggtccgcttcctttccgaacggggcgcccgtagttcacgcaccgactgaccggaactgggccggtaccggtcggccggcctgtccacatcagtatccagttgctgaggcgagccaggatcgcgggcactggcgtatgcggaatttgctgcggggctgcgcgcctgcgccgaaggagcgcaggcgcatcggcaagctcagcctgcggcgttctcctgcgcctcgtcgtattgacccaggcaggccatggcattcagccgtgagcgctgcagcagcacccgttgcgcttgcgcggcgttggcggcgtcgccgcgccaggcgagcaggggcggctcctgcaaggcgcgcccgtaggagaaggacaatcgccagggcagcggggcaagccggttcatggcgtccagattgacggtggcctcggtgggcgtctggccgccggacaggaagaagatgcccggcaccgccgccggcaccgtgcgcctgagcacctgcacggtctgcatggcgacctcggccggggccgcgtgcccggcctccttgccgggcagcaccatgctcggcttcagcagcatgtgctcgagcaccaccgcatgccggtgcaaggcatgaaagactgcatgcagcacggcctcggtgacctcggcgcaacgcgccattgagtgcgcgccgtccatcagcacctcgggctcgacgatgggtaccacgcctgcttcctggcagatcgcggcatagcgtgccagcgcttccgcattggcctggacggcagcccagcccggcaacttgtccgacacgttgtagaccgcacgccacttggcaaagcgcgcgccctgctggcgatagccggcaagccgcttggccagcccgtcgagaccctcggtgacctcgtccccgggtgccagggcgagtgcgatcttgcccttgtccaccttgatgccgggcacgatgccctggcgcgccgccagttccggcagcggcgtgccatcgtcggcgcgctggcccagggtttcctcgtacaggatcacgccgctgatgaactggccaaggcctgggctcgacaagagcaggttgcgccacgcgcggcggttttcctcgctcgactccacgccgatgcgttcgaaccgcttggcgatggtcggcccgctctcgtcggccgccagcaaccctttgcccgcttgtgccagggcgtccacggtggcttgcagttcgctttttctgtccatgatcaggctccgtgcaggtgacataggaacaagcattggcgcgaaaacgccgtcgcgcaagccaggtggggcacgtagcgcctgcctaaggtggccgcccgaacgcttcgcgcagcttgcccttggccttttccagcgtggcgcgacgcgccctgggcagatggcggccggcacgattgatgtagaaattgagcatcgacatcgccgactggaacgccgtgcccttgcggcgccggctgctcacggcggaacgcttgagcgaggcggcaatttcctcggggttgtccgaggcgaagatgtgcggttcgaggtccagcgcgttgctgtgctctgttatctgctgcgaccagcgccgccccttgctggcgccagctttggcgcggccctttgccggccggcgggtggatttcgcggcagccatttccggtcctcccatagctttatcgggatccgtctagcctaggcaacttctcgccgtcccgggggggtcaggggggaccggcgcgtggtggcaagacggcccgggcggtgtgggataattgcccctttgcccagggcgcagctcaagaggttgttcgcacgggcgcgcaagggtccttattcctgtggcccgcttcctttctgcgatattccttcagcaataaaaatgcccacataccgttccaaaacctccaccgccggccgcaacatggcgggggcgcgctcgctgtggcgcgccaccggcatgaaagacgaagatttttccaagcccatcgtcgcggtggtcaattccttcacccagttcgtgcccgggcacgtgcacctgaaggacctgggccagctggtcgcgcgcgagatcgaggccgcgggcggcgtggccaaggagttcaacaccattgcggtcgatgacggcatcgccatgggccacgacggcatgctgtattcgctgcccagccgcgacatcatcgcggactcggtggagtacatggtcaacgcgcactgcgccgacgccatggtgtgcatctccaactgcgacaagatcaccccgggcatgctgatggccgcaatgcggctcaacatcccggtgatcttcgtctccggcggcccgatggaagccggcaagacgcgcctggccaaccccgtcaccaaggccatggagttcaagaagctcgacctcgtggacgccatggtgatcgccgccgacagcgcctattccgacgccgacgtggccgaggtggagcgctccgcctgccccacctgcggttcgtgctcgggcatgttcaccgccaactccatgaactgcctgaccgaggcgctgggcctgtcgctgcccggcaacggcaccgtggtggccacccacgccgaccgcgagcagctgttcaagcgcgcgggcagccgcatcgtggaactggcgcgccagtactacgagcaggaagacgagcgcatcctgccgcgctcggtaggcttcaaggcgttcgagaacgccatgacgctggacattgccatgggcggttccaccaacaccatcctgcacctgctggcgatcgcgcgcgaggccgacatcgacttcagcatgaccgatatcgaccgcctctcgcgcgtggtgccgcagctgtgcaaggtggcgcccaacaccaacaagtaccacatcgaagacgtgcaccgcgcagggggcatcatggccatcctgggcgagctggagcgcgccggcaagctgcacactgatgtgcccacggtgcatgcccccacgctcagggacgcgctggagcagtgggacatcagccggacccgggacgaagccgtcaggaacttctacctggccggcccggcgggtgttcccacccaggtggcgttcagccagaacacgcgctggcccagcctggacctggaccgcgccgagggctgcatccgctcctacgagcacgccttctccaaggaaggcggcctggcggtgctgacgggcaatatcgcgctcgacggctgcgtggtgaagaccgccggcgtggacgagagcatcctcgtgttcgaaggcacggcccacgtcaccgagtcgcaggacgaggcggtggagaacatcctcaacgacaaggtcaaggccggtgacgtggtgatcgtgcgctacgaaggccccaagggcggccccggcatgcaggagatgctctacccgaccagctacatcaagtccaagggcctgggcaaggcctgcgcgctgctgaccgacggccgcttctccggcggcacctcgggtttgtccatcggccactgctcgcccgaagctgcggccggcggcgccatcggcctggtgcgcgacggcgacaagatccgcatcgacattcccaaccgcaccatcaacgtgctgctgtccgacgaggaactggcgagccgccgcgaagagcagaacgccagggggtggaagccggccaaggcgcgtccgcgcaaggtgtctgctgcgctgaaggcttatgccaagctggtgatgtcggcggataagggggctgtgcgggacttgtcgttgctggatgactgatcccggggcgaagctttgcttcgtttgccgataaggccgctctttggagcggcttttttttggttcttataagaacgcgccccgtggctggccttcgatcgatccaggaaattcgtttgctggctattggggcgaagtgctgacggtcgcggccgaggcggcgggtattgccgcactggtgatcgacggcggcgtacgcgatatcgcggcacttaccgcgcggtgacggcgaaagcccacatgtttaagcgattcatgccgccaagtaaaaggaggctggacgctccaggcccgagatgcagtcctatggtaaggttgctggcatgagtttacggacttcaaccagtgacgcatgggccgcagctatgtggtgctgggagagtgatgcagcgtgagtgatgcgaagcaggatgcgcggcgcgcgccgccgactgagagagtttcaaccagcagggctttgcgcctgagcgtgccgccagaggccaggcctgcgccggtcaacgggaaagactggctgcgacagaggaaagagcaattgcaggctgcccgtgccgctgccaggcaaaggcgcgatctgctaagagccgaaatcatgtcggccgtgcaagatgttgcccgagaggaacgcactgctgcgcggctggaggctgaacgcctgaaggcggaagccaggaccgcgcgggcctacgcgcgggaggacgcacgcgccgccgccaagttcgagcgcggccaaccaacccgctcggcgtccaaacgaaagacgcttgctaacgagaaacgcaagctggtttcttacgctgatctgttgcggatgcgtgggtgatccggtcattccatgggtcttgaaacggacggttaatccgatccgcctgcgggagctgactatctgcccttggtcaagggccacttcccgccgcggccagactgcctgataagacgcgctgcgcaacatcgcgcgattcgtggggaaccggaattcgtcagactgcgttttccgaaaaatcaatggcgcccagcggtgcgtacttcgcacgattgcctgtgctcttaaatctggtgcctgcctatgagaaaggcccgatgcgagcatttgctggcatcgggcaagaaggccggtgggcacgattccaccggacggtaggcggcagagaggtcagaaagtgtggttgataccaacgttgaaagcagagttgccggcgagcgggttgccgacatcattggcattccatacgcggtagaagccggacttggccgtgttcgccgcgcgattccagatgtgggcgtaagacgtatagagcctggtccgcttggagaggttatgtacgtagccgatcgcaaactgatgggcatcgttgtcggcgtcggtccgatcgttcttgtagatgtacgaggtcacgacccgcccggcgccgaccggaatcgaagccccgaccagcacgtcttccgatttgaagttgggcgtgcccggtatgatggcgcctcggttgatcacgtagttgaggtaaccagtcgcgagcccgaagtcgtacttggcgccgaagaacacttcccgtgcattcttgccagggccgttggcgtcatgggcgtccgcgtaggcgacgcgtcccatgaagctcccccccgaatagccaagtgacgcgccaaactggctgttggtggccgcactgccgggcacttcgccaaagctgtaggacagttcgccatcgaggccgccgagtgtgcccggcaggttgtatttaagggcattgtcgacacggttgctgccgcctcgaccgccggctgaaatcaggtttgcagacgtgccggccaggccagtcacaaacggatcgaactccacttgtgccagcgccagcgttgtatattgccgccccatcgtgatacggcccggcgatgcgtcgagtccgacgtaggcctgcctgccgaacagtaagccaccttgacctgatgcgccagtatccatcaggatgccggcttccagcgtaaagaacgctgccgtgcccccgcctagttcttcgcgtccgcgcatgccaacgcgcgagcctgacatcatgccgctcgtgacctttgttaccgaaccggctgccgcgccgttttcgtgtaccagcccgacgtccgctacgccatacagattcacgctggacgactgcgccgcggcatatatcgagtgcccacctgcgccgaatgccactgccgcgccgagcacgcatcttgccaacatcgcccgcttcattcccatatcgattctcattctaaattttttaaaatatgcaaatatgtatgaaatatctaaatttttgcgtggcgcgcacgagggcgccagtcagcctggtggactgtgagcctgctcctggttggggtcctgccgggtgcggcggcgcggatctacagcattgcagcgaagtgccgcgtggtctctagtagcgaataggaggccttgaagccgatttcgcggtgagcggcactgacgtcggacgacgccggtcgcacatgcggaaatccggcaaagccgccctcgggcagcctgagatcggtggtctgcagcgccggataacattggcgcacgacatcgatgaacgcttcaaccgagaaccattcgccggtagcgatgttgtacacgcgttgacgcggtgccggtgcggtcagtgcagcgatgttggcgatagcgcagtcccgggcatcgatgaattcctcacggccgttccacaacaggatcggatcgtctagccttgcaggcactccggtgcgtccggcttcgagcagtgtggccagtagccggcccggcacactggtgaccgcgtcccgtccggcgccgagcacagcgccgtagcgcagcacgaccgcatcgacgtcatagagcgaggcgtaggcgagcgcgagatgctcgccagccagcttggtggccgcatagatgctgccaggccgttcgctgaggacccgcaacgggaaatcctcggcgatcggtgtggcaggcagggacgggaaggctgagtacatgacggtggtcgagctggcaatcacgacacgcgagagcttacgctggcgtgccagctcaagaacgtttgccgttcccatcgtattgacccggatgccggcgagtggatccttgcgaatggcagtggaaagcaaggccgccgtatggacgatagcggtgaccccatgctcgtccaccaggcgggacaatgcgtcgtagtcggtcacatcgcacaatgccagcggcagcgcgcccagttcagcagaatcgggccgcctgacgtcggcgagcagcacaggttctccctgggccagcaactgcgcggcggtcagacggccgatcaggccggcaccggtgactaatatcgtcatggctgctcctcagtcggcctgaatgccgaattccttgacgatccggccatagcgctcgtagtcggcagcgatcagcttgccaagggcggctgggtcgctgccctgcggagtcacggcaaccgttgccatccgggcgacgacgtccggcattttcaggatgtcgttgaagtgcttgttcagcgtcagaaccagttccggggacatgcccttcgggcccaccacggcctgccaggcaccaacctcgacatccttgtagccaagctcggccagggacggcacgttcggcgcgaaaggcgagcgcttcttgtccgcgacggccagcggaatcagcttgcccgacgggaagtactgggacaccggcccaagcgtggagtacatcatcggcacctgcccgcccagcaagtcgaccaccgcgggggcgctgccgcggtaggggatctgcgtgagcttgatgccggccgatttgttgaacagttccgccagtatgtgcattggcgatccgttgcccggactgccataggttttcagcgtaccggctttagcatgcgtgacgaagtcttcaatccgggtgacaccggcggccttgttgaccacaacgaacagcgactgcgtgccgagtagcgtgatcggcgtcagatccttgcgcgggtcgtaggaggcacccgtgccgggccgcagcacgtgcggagagatcgagattgtgttcggggcgaacagcagcgtatagccatccggcgcagcctttgccacgtacgccgtgccaatggtgccgccggcgccggtgcggttctccaccacgacaggttgcccaagccgagcagtcagcttctcggcaaagaggcgtgccagcacatctgtatcgccgccggctggataggccacgagaagcgtgaccggcttggttggatagctgccctgcgcagtggccccgcccgtcgcaagtagggtggcaatagctgtcagggcaaccaatgcccggcgtctcgcggatttcttcatgtgatccaactcctctaggtgcattgcggcccgccgggcctcacagcagatccggcgctcaccgcgcattgttcatatatgaaacggcgtctcattgaacactcatgaaaaattataaatttatatctattgaataaaaggtggagtttaccctgcgtgggcgaggagcgcggaaatggcctgtatcggctgcagacgggcgaaattcgggcctgaatcggtaatccgacgggtccggcagcacctgctctggtccccggatagtgcaaaatttcgttgttggaggtaaatttatgaaattgccagtgtcctatagatgccggccagcccttgccgctcatccatccaacaacaaatcatgcggacttccgatttgccgcgcaggctgcagcacgcagagccggcgccgacccagaccatttccgagaaggcgtatcaactgctgcgcgcagacatcatcgcgggcagcctggcccctggggaaaagcttcgcctgcaggcattgcaggaacgctacgaactcggcgtgagcccgatccgcgaggccctgatgcttctctgcggcgaaggactggtcagcaatgagggccaaaggggcttcagcgtgaccaagctctccaggagtgatctgctcgatctgatgcatgcgcgcacctcgatcgaactgctcctgctggccgatgccattgagcatggcgacgatgactggggcgcgaacatcatggccgcctattacaagctgaccagggcgcggctcccgaccgatgcatcggacacggtggcagtggaactgtgggaaacggctcaccggcgctttcacctcgcgctggttgcagcggctacgtcgaagtggctactgcgcatcgacgaacaactggtcgaccattctgagcggtatcgtcgaattcgcctggcctacccgcgctcgagcaaggaactggccgacgatgtgttgaaggaacacctggatctcatggaggcggtgctcgcgcgcgacacggagaaagcctccgcgctgctgcggcaccacctgatgcgcaccgccgaagtcctcagcaagcgctttgccgactagccccaatttcagggcttgtcgggcagcgcgacataggccacgatttcgatgcgcatgcctggcactaccaaggccttggcgatcaccgtcgagcggtttggataaggcggggcgaagaactctccatagagcgcatcgactaccggcacgtcatcggcttccaacagggtgatcagcacctgcaccacatcgttcaggtccgcgcccgctgcttcggtcgctaacttcaggttctcaaacgtcaggcgggcctgccgggcgatatcgccggtatccaccgacccgtcaggacggactggaccgtgcgcagtgaacagcagacctgcggcctgggtcgcccaggaaaatggctgtgccggagtgggcaagccagtctcaatgacttgcttcactgtgaggtctccttgacgagttgcgcgagccgcgcataccaagggtgggaagggtccgaaagcgcagtatgcgtgcggaaatgatcctcgcccgcgtgcatgtagcaatcaacgggagccggctgcatcctcagcatggcgtacagggtgagattggagcggatcacgcgctcgctgtcatgttcgccgtagctgagcaccatcggaacggtattgccggcagaccacgtcagcggactcattgccgcatccagttcctgcgagtcgagcaatgcggtgtacacccgctcctcaagactcccgggcgccgggttcgggtggtgcaggttcatgatgccactgatgggcaggcaaccgcgaatggcctgctggtcaatacccaccgcgcgcagttgtggttttcgcatcgccgccatggccgcaataccgccgcctgccgaatggccggaaagatagaggtgagagggtgagccgccccaggtggcaatgcttttctgcacgctgcccaggagcaacgccgcgtcgtcaaacgctgcgggcaacctgtgggccggtgccagccgatacgtgggcgccaccagcaccatgccaaggcttatcaccataggcgcaaggaacgaggcgtattccttgtagccattcgtccagcccccaccatgccagaagatcaggacaggcgcgtcgcgcaaccctcgtgccgtaaacacgtcgaaccgctgccgctggtcggtaccgtaggtgaggttgcgcacagcgacgacgctttccggcaggtgttcggcccagtcaagaacggtacgttcatacgccactgcggccgcggacgacagcggtggctgagatggctctggttcagttgcgaactggtctgacattttcactttgcttccatatcaagtacgagccaccggcttgcgccgctcctggcagtttgcaaaatatacatctcaattattcatgtttgcaagagaacaatttataaattaaaggcgcaatgtccgtgccggataggcaacggacgcctccggcgacacgacgcatatcacctgcggggttggatggtcgctaccgcgagacccgctccggcgaacgcgcacacggcggacaccagcgcaaccgcgcgcagcgcttcagtgatagcttcggcttccgccagcgccacgggtggctgggtcggcaaatgggcgtcgcccgctgccgccccggcttgcgcgcccggctccagcaactgcccggtccggcgtgcgtccctgggaacgcccagttcatcgagccgcgccgacagcgccgcctggtgcgaccacacgaacacgatgccgagcaccgcaactgccagcagactcgccatacgtgcaaccgcattgttgatgccggatgcaacgcctgcgtggtcagccggcaccgagcccatcacaatcgtcgtgagtggcgcgacggtgatcgtcatgccaagcccaagcacggtgagcgcagggaaaaatccggcccaatagctgccgcccacgaacggcaacgccagcatcacgaatccgattcccgcgatacccgggccagcgctcaacaggatccgcgagccgaagcggctcgtcaggccgccggtgaagcgcgacaacaagccgatgatgaccggcaccggcagcagcgccgcgcccgcttcagttgcggtgtaggcatgtgcgcggatcagcgtgaacggcaggaagaacagtgcgccgctcaggccgaagtagagcagcagtgtgacgaggttggcgccggtgaaatcgcgtgagcggaacacgtcgagcggcatcatggggtgacggctgttcgcttcgatcatcacgaatgcgaccagcacgagcgcgccggcgccgatcgcgcacagtacaagcggatctgcgaaaccgcgcgcagacgcctcggtcagaccataggtgagggcagccagccccgctgcgacgctaagcgcgccgggccagtccaactgtcgaggcgcatcgagcttgtggctgttcggcaccgacaaaatcgcgagcgcgatcgtcaccgctgcaagcgggacgttgaggaagaatatcgcgcgccacgacaacacgtcgacgagccagccgcccgccaccggcgccgccgccgacgtgatcgccccgacggccgcccaggtgccgattgcccgtccgcgcgcttcgccttcgtacacggcgccgatgatcgcgagactgctgggtacgaagagtgctgcaccaatgccctgcactgcgcgcgcggcgatcagcgaattcgcgtccggcgcgaacccgcaagcggccgacgtcagcgtgaagaccccgatgcccgcaatgaataccgtgcggcggccgagcttgtcgcccatcgatccgcccaccagcacgagggacccgagaaagagcaggtaggcgttaacgatccactgcattgccgcgacgctcgcgccgagttcgctctgaatggcgggtagcgcgacattgacgacggagccgtcgatgaacgccatgcttgagccgaggatcgtcgcggcgagtgctagacgcttgcgccggcacgggcggtcgactgcggtgggctgcgtgcggatgacgagttcgtcgcacgggcttgcttgtgcagcgatgacgtgcgcgatcatttggtcgctatcgggaagatccgggttggccaagctcgctcccgtgccggtcgatggtgactagcatagtagtgggagtgcgggaccgccgatacggttgggacgggtgcgtgcgtgcgagcggtcgcggcgcccatcagttgcgcggtccgcctcatctagcgcatggaaccaggcgtgatcgctgccatcgatctgcaccggttcgctccagacttgctgttcgacaccggcttccgggtgtcctggaagctgcgcccacccaaaagcatcagccgtgcaaccggcgggaatgtctatgatccggcatacgaagactggcgaaatcttgatgtcgtgccgctcgcgcagggtctcgcaggccagcattgggccgaagtcggcgtagctgtcgcgaatcaggccgcgcacgcgggattccaggtcgggcggttgggcccgttactccccttggtgggagggaagtcgatcttctagcatagatacgctggccaagcgaccgacaaggcagggagcgcttgatatgacggttacgaagcttcaggaggtaatggatatgtctgccacaaggattgagatgtgcgaccaggatggcgacggggtattgaccattcgagatgacggcgccgcattttcaggagtcgcgcttgagctttcgaatctattcggtgaagacgtggtcgcggatcttgataagcaccagttgctcaaatggtgcgagatggtcgcggcccatcttcgcaaccaaggcgttatgccaggcgagtgcgctccggagggctacgtcaacaaaactagtcaaagccggacgaaagagcagcctggcgtcgaggagcttttgcagtcggcggcatcttgactctggcgaacgcgagacgctttgctggcaacagagcgtcttttcgttggcgcattgcttaacaatccccaccagccagcgattccggtcgacggccgtttccgattgcagattcaaccggtcgatgcaacagcttgatggaatcgttcagccggtaccggccggatgccctccgcgaaactgccgcccgatgttgccgccttgaaccccaaggccggcccactactgcgttgcgatggccagcacgcctcaggcgaccgcacccggcggcgcatggcgtgccaggaagcggtccaattgcccagcgaacgccttgctgtcctgctgggcgtacgctgccggcccgccggtatcaacgcctgaactgcggagttgttccatcacctcgcgcatggtcaggcgctcctggatgttctcacggctgaaccagcttcctcgcgggtcgagcacataggcgcccttgtcaagggcggcggcggcaagaacgatgtccgccgtaatgacgaggtccccgctgctgaccaactcgacgatacggtcatcggcgacgtcgaagcccgcaggcacttgcagtgacttgatgaagcgcgaaggcggcgtgcgcatgtactggttggcaaccagcgtgacgcacacttcgacacgttgtgcggcccgatacaacatttccttgacgacaaccgggcaggcgtctgcgtcaaccagtacttgcatcgcgatacttccaatggggggagggaacgctcatcttactgcctgcgcgtcccgttcgtttgttattcggccaacccctggtccggcggtagccggcccgaacgcaccttcgcctttacttcccgcgccgcaccgtcgtgaggtgttcgccaaagaaatcatcgacgacttgcgcggaatcctggccaacgtctgcaccgaagtagaggcggacattgtggaaatcgatggagaggacgatcacgtccacctgttggcaggatgtacccgcaagcctcgccggcgcctcttcacgaatgccggccacccctcatgatcgcgctggccgtgtcgaccacggccgccagggcaagcatggcgatgatcaccgtgcaagcctggggcagatggaacagggacagctcgaaatacaacatctgcccaagcccgccggcgccgacaaagccaaggattgccgccacgcggatattcgtttcccagcggtacaggatgtaggccagaaactggggccatacgcagggcagcgtcccgtacatgaagaccagcgcggcaggagtgcccccttccatcagcgcgcgggcgggtgcgcgcggcgcattctccagcgcctcggcgaacaggcgaccgagcacgcccgcggtatgcagtgccagggcgagggtgccggcaaacggtccaaggccgactgcgagtacggtcagggcagcccataccagctcggggatcgagcgcaacaggttcagtagcaagcgcgacaaggcgcgcagcgcatcgccgtagagcccggaagccggtagtgccaggccaaaacccagcaccgccgcacacagcgtgcccaccgcggaaaccgcgagcgtttcgagcatgctgccagcggttctggccaaaaaagcgggtgacagctgcggcgggaagaacgtcagcaggaagcgcgccatctcggctgcagcgtccgcggaaaaaagctgacccagatcgagcgacagatacgcgaagctgcccgaaaccgcggcggccaccgcgatcagggtgagcaggcagcgcatgcagaattgagcggccttgaccttgtgcgccatgattcagtcgagcagcttgcgcaggtgcgcgctgagcgcgtccgccagcaggaccagcagcaggaacactagcaggatggtcgcggcttccccgccgttgagcagtttcatggcctggtccatcaactgcccaagtccgccggcgccaacgaagcccatgaccacggaagcccggatggcacattcccagcggtagacggtgtacgagaccagctcctgcgaggcatggggaagcagcccatagaacagtgccgccaggcgcccgctgccgctgccaagcagggcatccacggcgcgtgtgtcgctggattcgaggatttccgcatagacctttgccagcatgccgccataggtgatggccagggcgagcacgcccgccgccgcccccaggccgagggcgcgcacgaagaccagtgcccacaccaactccggcaccccgcgcagcagcagcaccagggcgcgcacgccagcgcgcaccgccatgcgcggcttgcgtccccggccggggccgatgcgcgacaccgacaggctgcccgtcaaggccacggccagaggtgttgcgatcacaaaggcgagcgcaatgcccgcggtggcgatcgccagcgtttccagcgtggcgttgaccacaagcccgaggaatccgggcgaaacctcggggggaaggaagttgcgcacgaaggcgcccatcaccttgaggtttccggtgtcgaacaaggctgaagggctgaaccgggacagctgcaacaatggccacagcagaagcagcgcgagcaccaggccgctggcgcgccgcagcgcctggggatcgcgcgggtgggcggtcatcggcacgccggcctgggttgggtgtcgccaccgatggcggcgctcgcacctgccgcgatgctcgtcagggcctggctgccctgtaccggtggcgatgcgctttcggaggcatagagttcgcgcagcagcgcgtcggtgacgcgctcggccggcaggtcgaaggcgatctcgcccgccttcaggccgacgatgcggggaaaccagcgcagcgccagatccactgcgtgcaggctggcgaccaggggcaccgcgcgtgtatccgcttccctgcgcagctcgcccagggtgaggttggccagcaccgggtccattgccgagaccggttcgtccgccaggatcaattccgggcgctggtaaagcacgcgggcgacgcccacgcgctgcagctgaccgcccgagagctggtcgcaccggtcgaacaggcggtcggccagctcaaggcgggcgagctgttcgccggcaccatcgatgtctgccggatagaccagcgacagcaaggatttccaggcgggccagatgcccaggcggccggcaaggatggccgtgaccacgcgctggcgcggcggcatcggcggcgcctggtgcaccatgccgatgcggcagcgcaactgctgcaggcgtgcggcggataccgcccaggggctttgctccagcacctccacacggccctcgcttggccgcagcgacgttgccagcaagcgcagcaaggaggtcttgccggctccggacggaccgatgacggcgatgggctcgccgcggctggccgccaacgtgatctggctgagcgcacgctgtccgttggcgtaactgacgctggcggcgtccaggcggaagctcatcagaccggcatcaccggatcaggcccgcggcccgggctgcggcctcgatgccgtcgtagttttcgggccgggtgggaatgtacctggcggtccgctgcaatgccatgatctcgcgctgctcgggattggccgggtccagccgcaggaatgcttcggtcagcttcttgcgcaaggcgggatcgagcccgccgcgcacggtccagttgtagtcgtaatagggcggtgtgacagcaaataccctgaccttggcgggatccaccttgcgctgctccaccagcttgtcccacaccgaggcattgagcacgccggcgtcggccctgccggcctgcacgaaagccaccgtcgcatcgtgggcgcccgaataggcgagcgtcttgaagtccttgtccgggtcgatgcccgcctgcagcaggaagtgccgtggcatcaggtggccggaggtagaggacggcgcgccgaagacgaaggtgtggcctttgaggtcggccagtgacttgatcgcgctgtcggcggtgatgaacttgctggtgaaggcggcatcttcctggcgctggacgatggggatggtggctcccttcgtccggatcttgctctgcacataggtaaagccgcccagccacgccatgtcgatcttgccggtggccagcgcttcgaccaccgcagcgtagtccgtgacgggcacgaacttcaccttcatgccggtttccttctccaggtagttgccgagcggcgcgaacttgcgctgcagttcggtgggggactcgtcgggaatggccgagaccttcaggacagcctgggcactggcgaggccggcaaagcccagcagggtcagcgcggcaaggcgcttaagcaacggcaacacgggcggctccttgcgtcatttctccgatcacggcagcgtctgcgaagccttcccggttaaagatctccaggacctcgtccacggcttccggtgcgcacgacaccagcaagccgccgctggtctggggatcggtcagcagtgcctgctggcttggcgtgaccgacgtggacaggtccacctcgctgccgtagctgacccagttgcgccccgatgcgccggtcaccagcccttcggcggccatgcgctcgacccgcggcagcagtggaatccgcgccatgtccagccgcgcgccgacgcccgcgccacgacacagctccagcaggtggccgagcaggccgaagccggtcacgtcggtcagcgcgtggacagccggcacttcggccagcagtcggccgggcgtgttgagtttggtggtgcaggcaatcagttcctgatagccggccgcgtcgagcttgtccttcttcaccgcggcggacaacacgcccacgcccaacggcttgccgaggatcagcttgtcgcccgccttggcgccgctgttcttcttgacccggttcgggtgcaccagaccaaggaccaccagcccgtagatcggctcaagggaatcgatggtgtggccgcccgcgaccgggatgcccgcctgggcgcagatcgattcgccgccttcgaggatcttgccgatgacctcaggcggcagcttctcgatgggcatgccgaccagcgccagcgccatgatcggggttccgcccatggcatagacgtcggagatggcgttggtggcggcgatacgcccgaaatcgtacggatcgtccaccaccggcatgaagaagtccgtggtggcgatcagggcctggctgtcattgagctggtagaccgccgcgtcgtcgctggtctctttgccgaccagcagtgctgccggagcagcgaagccgaccgaattccttaggatttcagaaagcacaccgggggcaatcttgcacccacacccgccgccgtgggagaaggcggtgagcttgatctttgcgttgtttggctggtccactgcggggctccgagtcattctggtttcaaggcgtcggcgacaagtttactcacttccgcccgttcccgcgccggcgcgaacagcggcgcgcgaattgcgcattgctgccgcaggcggtccaggaacccggcatcccggctggtgcgttccagcaccagcgccaattgcgcggcgtcacccaacggaaaatagccttcgtagtcacggcccagcatgccgacgttgcccgggatgcggctggccagcaccggcacgccactggcgacggcctcgatgatcacgttggcgccgccttccatggcgctggagatcaccatggcctgtgctttccggatgtgctgcagggtttcgtcatggggcaggtttccgagccagacatagcgccgcacgccgggccaggctcgtgcttccagcgccagggcctcctgccgataggcgtcatccagcgcgccgccgatgtggatcaggcgcacgcgcgaatcgtcgggaagcagcgagagcgcgcgcatgggcgtcagcgggtctttttccgcccgcatgtggccgaccagcacgacgtcgaagtgattctggcggggcgccgcgggcgcgcatgccggggcagactggtagatcacccggcaccgggcgcgatgcgcggccgccagttcggccagcccttcgtcctgcagcaccaccaggtgggtggcgagttcgagcgagcgctgggccgatgcatcggtgcggatgtcgcggtacagatcggtgccggtcagcacgacgatcagcggacgatccggacaagcctcggcaaacctggcgatggactcggccgagcgccgggcgtgcagggcgatcaggcagtcgggcagggcgccgccctggctggccgtcgaccattcagcggccagcgtgacatcgtagtccccctgcaggaaccgggcccagcgattggcggtttgccagttgccattgttggctttgcgcagcgctggactgataatcgcgacggtggccttgggaggacgcatgatgacaggttctgagggggcggcagcaagaaggataaacaagttcgagctggatgcggcgtttgccgatgcgcaccggcgcacctgggccgtgcttgaggagctgtcgccgtcccaatggcaggttccttatgacgcgggaatcaatccgcccttgtgggagtatgcccatatcgcctggttcacggagcaatgggtgctgcgggagccacgtgccggcgaggacggctgctgggtggccagcctcccgtccatgctgccggacgccgaccgcctcttcgattccatgcgcgtcgcccaccgggaccgatggcatcttgcgctgccccggctctccgagattcgcgactacgcagccgccgtgctggagcacgttcgcgccaggctcgccacgtcggacgataccgacgctgcgctctatttcttccggctcgccttgttccacgaagacatgcatgcggaggcgctgacctatatgcgccagacgctcgattatccgctgcatgccccgctcggcatgccttccattgcgccgggcgccggctcggcagccgcaggcggcgacacgttcgcaatggggtcgcccatcgggggcgacgggttcgtcttcgacaacgagaagtggtcccacccggtccacatcgcccctttccacatcgatcgcacttgcgtcagcaatgccgcatttgcggaattcgtggccgccggcggctaccgcgaccatcaatggtggtcagacgacggacgcgcatggctgcaacagagcaggctggcgcatccggtgcgctggcgccggacagccggcggcaccgcggggcaatgggcgttgcgctggttcgggcagtgggtgccgctgccgcccgaacagccggtgtgtcatatcaatgcccacgaggcggaagcctattgccgctgggccggcaagcgcttgcccacggaagccgaatgggagtatgcggcaacgcatgacctgatccgctggggtagcgccgtgtgggaatggacggctgatcctttcgtgccctatgcagggttctcgcccgatccctaccaggaatattccgccccctggtttcacacgcatcgctcggttcgcggcggatcgttcgccacccatgcccgcatgcagcatcctcgctaccggaacttctacctgccgcaccgcagcgaccccttcgtcggattccgctgctgcggttgaggaaggagggcgtcttcacggtgatatcaacgatgcggctgacaccgccctgaccaccctagcggcgggccgacccaccaacgcgaagtgcattcaccaccagcgaaaaggctggcgatgcctggcggctggggtagtacaggtggtagcccgcaaacggagggcaccagtcttccagcacgcgtaccagccgaccttcctcgatgtggggtgcaaattcctcttccgggaggaaggcgacgcccagcccctcaagcgcggccatcacgatatggggcgtgctgttgaaaacggcctggccgtcgtcgcgcaccttcaactgacggccacggcgctcgaagtcccagacggacaagcccgcatgcatcgccgatgccgcgcgcatgaggtatcttttacaagggcgaggcacgccagccgccggaaaggcccggcgggacttgtgccagggccgtggatcggttcttgcatggcaggctgtgcccgagccgtgacaggagcgcgccatgtccgaagcacttcgatcctcgctttgccgattcttcatcgcctgctgcctgggtatcgcagcttgcggagggggcgggggagacgggggcggtgacagcgccaccggcacgctgacgctctccatctccggcctgccgtccgggacgtcggcggccatcacggtattggggcccggccagttccgccagaccgtgacccagtcgaccacgctgtccaacctggctgctggcagctataccgtcagtgccgccagcgtgctggctggcagcacgctcctcaagccgcagccgccttcgcagaccgtggcggtgaccgcgggcggcagtgctttggcaagcgtggaatacggctcaccggaaacagtgcagttgtcgctgacgcaggttgccggcgggttatccgagcccatcttcctgaccgcgccccccggcgatccgcgcctgttcgtggtcgagcgggccggccgcatccggatcgtgcgcaacggcgcattggtcgctacgccgttcctcaatatcgccgcgctgacgacgaccgatggcgagcgcgggctgctgtcgatggcgttcgatcccaactatgggaccaacggccgcttctacgtctattacaccgacaccaatggggccatcaccatcgcccgctacaacgtatcggccgcgaatccggatatcgccgcggcatccggcaccgtgctgctgtcgattccgcacggcaccttctccaaccataacggcggccagctcgcgttcggcccggacggcatgctctatatcggcacgggcgacggcggcggcggtggcgatccgtcgggcaacgcccagaacccggcaacgctgctcggcaagatgctgcgcatcgacgtcagcggggcatccggctacggcttgcctgccggcaatcccttcgtcggccagtccggcagccgcggcgaaatctgggctctcggcctgcgcaacccgtggcggtttacgttcgacgccggcttgctgtatatcgccgatgtcggcgaggaccagcgcgaggaagtcgacgtggcgccggccaccagcgcgggcctgaactacggctggaaccggaccgaaggcaccgcctgcgtgggtgcggccacgtgcgacaagaccgggctgaccatgccggtcttcgaatacggccacgaagcgggcgcttgtgccatcgtcggtggctatgcgtaccggggcagtgccaacccggtgctgcatgggcggtacttctattccgacctttgcacgggcaagctgctgagcttcatgtatcgcgacggcgttgtcgcagaacaggtcgactggaacgtcacgatcccgggcagtgtgttctcgtttggcgtggatgacgcgcaggcgctgtacgtgctggccgatccgggcacgtcggcgacgagcgggcgggtgtatcggatcgatgtgtcggacggcacgccttaacggcggggcgcaggagcactgcgcttcgggcaggggctcctggccgttgaaccgccgcggacgtgctgctatggcactttcctgcacgcgccctcattgctgcacgtgcatcacagcaaatcggccaaccgctgccggcataggctcacgaactgctgtgccgcagtcgactggccttgtgccggatggaatgccaggattgcccggaatcgaacgggagcggtgagcggtacgctgcgcagcccgagcgcaacgtagccacgggccaccaatggattggtgatcgcaaggccagcaccggccagggtcagtgagcactgcgtgtggctgtacggtgttgtcgccacgaaacgcggctcgatgccggactcggaaaagcacgcttccagccggcgttgcgcaggatccgaagcgtccaggccgatcaacggaacctcgatcagatcctcgatgccgactttcgcgcgcgccgcgaaaggatgcgtcgcgggagcgacgcaaaccgcctgcactgcgtagaactcggacgcggtcaggccgctggtgtccgcctcgtcgcccatgaacgcgatatcgagttcgcgctgaagcaggcgctcgcgcaagcccctggagctgtcgacctccagctggcaacgaacgcgggggtggttgtggatgaagtccgccaccgatgacggcatcacgctggaggccatggcgtgcaaggcgccgacgcgcaggatcgtatcttcataggaacgcaactgatctatcttgcgctgcacggcgtcgaggccgacatagacgcgctcgacttcgtcgatcagggacgccgcctcgggcgtgggcgccatacgccctttgcttcggtcgaacagtcttaaccgcgctgcctgttcaagctgcagcacgatctgtgtcacggcgggctggctgatgtgcagggcttcggcggcccggcgcgccgatcccaggcgcatgaccatgcgaaacacctcgatttggcgggcgctgatcacgatgtcggtggctgtccccatacccaaccctataagttttgcttaattcgataatcggaatgcctgcgctgcccaggcgtgacatcacatagactcgggtcatgaccacttgggcttttatcatgcgcgccagtcgctatccgcatccgaccgaagcgctcgtcaatccggcgatgcatgccctgcaatgcattacctgccacgctcaatatccagtcagcgacatgccggaagggtgcccgaactgcgcaagcgccggccggcccagtagtctcgaagttgcctaccagcaccacgcactggattttgcaccaagaagcggaagttatacatgggggcattggcagccgtacctggaaggcgtgtctttgggggagggcgccacgccatgcgtaccggtgccaaccctggcgtcgctggcggacgtggcgtccgtatggatcaagaatgaaggcgcaaatccgaccggctcgcacaaggatcgcatgtcggcgcaggccgtaagccgggcgctggatattggcgcgagcgaggtggtgctggcgtcaagcggcaacgccgcagtctcggccgcggcctattgcgccgccgcgggactggactgcgaagtcgcgacctaccaggcgcttccgtccgttttcgatgcggcgttgcgttactacggtgcgcggcgtgtcatctgcgacaacggtcacgcgcgatgggcgcatgtccgccgccgcgtcagggaagagggagcctttgcactgaccaactacagcgtgcccgcggtgggtagcccggtatttggtgtggaaggctaccgtgctgtcgcactggagtgggtggcgcaaggatgccgccccgaccatgtcatggtgccgacggcgcggggggatctgttgtggggcatctatagcgcgctgcgtgacctggtcacgctgggacatctcccgaagctgccccgcctctgggcgatcgagccgttcccgcggctgtcgcgcgtgctggcgggcgcgccgcagcagtccgacttcccgggcacgacccagcaattctccacggccggctcgaccgtgaccgcgcagcaggtccacgccgtcaggcaatcgggcggcggcgcggtggtcatcgacgacgcggcagcacgcgacggtacccgccgtctcgctgcggccggattctgggtcgagctgtgcgcgggagcggggtttgccgccacgcaagcgctgcgcgccgacgggcgcatcgccaggacggaagcagtcatgctgatgctgactgcacgcggcgatcgcgatccgggacaagcttgatttccagacaatattcggagccacccatgaacttgcgttctctgttgactgccatcaccttcggcctcgcggctcaggtaccgtcggccctggccgcctatcctgaaaagccgatccgattgatcgtgccctgggctgccggcggcagcaccgatgcgctggcccgtgcggtcgcgcagcgaatgagcgaatcgatgggccagcccgtggtcgtcgacaatcgcgccggcgcctccggccgcatcggcgccgacatcctcgcaaagtcggctcccgacggctacacgctgggcgtcatcgagctggctcataccgtggcgccgtcggtgttccgccagatgccatatgatgtgttgcgcgacttcacgccggtttcactgctcggcgaggcgccgctcatcctgttcgcggacagcacgcactatcgcgctggcgacgtccagcgcttccttgcggactcacgcaaggcaggaacgccgctgcagcttgccaccagcgggaacggcacgatcagccatctggccgccaagatgcttgaagcgcaggcgggcatcccggtcgatgccgtaccgtaccggggctcggcgcccgcgctgaccgatgtgtccgcccaactggtcaaaggccatttcgctacgctggcaagcggcagcagcctgcttggcggtggcaagatcgcggccttgatggtgacggggccggtgcgcgtgacttcgcttcccggtgttccgaccgcagccgaagccaggctgccgggaatgcaggtcagccaatggtgggccctggtggctcccgcgcgggcaccgtctgccgtcgtgagcaggcttgcggacgaagtccgcgcggcattgacgaatccgcagaccaaggcacggctcgacagccaaggtatcgacctcaaggcgtcctcgcctgctcaactcggagaccggctgcgcgcagagacggatcgctgggcgaatctggctaagcaggctggcattcaacccgaatgactagacctggacaagcgcctggatcctgacatggggagtctatatcggcccgcgtcgtgaccgccacaacatgacggctggcccagttgctgaaaatgcctgctctgggagcggtgaaaaccccggcaccttctcgacttcgttcccatctggatcgacgtatccggccggtaatacgccaagcaggtgaaatgacgggccatacccgcgttggctgcggctgagcatggtgcccttacaatgccgatggttcagatcgactggtaggcgcaaacaggtgtcatgcaaagcaagagcaaagcaactctcatcgggctcatcgcgattctgttatggagctcgattgtcggcctgattcgcggtgtcagcgaaaaccttggggcaaccggtggggcggcaatgatctataccgtcgcctcggccctgctcttgctgacagtcggtttcgtcagaatgcaggattttccccggcgctatctggtttggggaagcattctgttcgtttcgtacgagctgtgtctttccttgtccattggctacgccaacagcagcaggcaagccattgaggtggggatggtcaactacttgtggccgagcttcaccatgctgtgtgccatcgcattcaacaagcagaaggccaacttgctgatcattcccggcttcctgatcgccattctcgggatctgctgggtgcttggcggggatcagggcctggacttcgccgggatggcggagaacatccaggacaatccgctcagctatgggctggccttccttggtgccctgatctgggcggcgtattgcactgtgaccaaccggattgccgaaggcaggaatggcatcacgctgttcttcatgctgacagcgctggcgttgtggatcaagtatttcgccacagagagcgggtcgatggaatttagctatcaggcagtgatttatcttgcgttggccgcctctgcgatgggattcggctatgcggcctggaatgttggcatcctgcatggcaatgtcaccgtccttgccggcgcttcctacttcattccggtactttccgccgccctggcggccatgctcttgcgtacacccctgtcgatcgccttctggaagggcgcatccatggtatgtgcggggtcgatcctctgttggctggcaacacgtgggcaacgttccaaggcacctccgttgccggaattaccgcagtcgcgcgaacgtgtccaggaaccgtgagtgcgtgcgaccgcgctgtttgatcaagcaagcagtatccaacttatttttcggtcggcctgcctgactggaagccagcgaccaggtcgtgtgcattggctggctcggcgatacgcagcaccagcttgcttgccgccttgcccgactggaccagatcgagtgcgcgccccgcgtgttccagcggcaggcattcgatgcggggcggtcgcaggcgcccgctgtcgagcagcgccgcgatctcgcgcagccgcgcgccgctgggcatcttgctgaacgccaccgcggtgcggacgccgcgctgcgcggctgcggcaggatccgggccgttgtcgccgctgaccagcgtcaggatggcgacaaggatgccgccgggcctgagcaggtccatgccgttcggcagggtgccgcagccaacggcgtccagtaccaggtcgacgccagccggcgcccatgcctgcatcgcggcagcgatgtcgccgccacggtagtcgattgccaggtcgcagccgagcgccatcagttcgtcgcggcgtgccgcgctgcaggtggctgcgacggttgccccggctgcttttgccagttgcacggcaaacgtgccgaccgcgccggcaccgccatgaaccagcaccgtctgcactggcttgagtccgccttcgtcgaagagtcccgtccaggcggccagcgccggggtcgggacggccgcggcctcggcaaatcccagattgtcgggaatcggcaccacgcaatcctggctgaccgcgacgtattcggcataggaaccccacttgcctgcgccgaccgcggtttgcgcgaacacgcgctgtcccgggacgaaatccttgacgccgcttcccaccgctgccacgacgccgctggcatcgaagccgatcacgaacgggaagctgtactgcatgaagtggctcagatagccttcacggcatttccagtcagcgggattcacgccggcacaggccacgcggagcaggacttcgccggcagcgggttccggcgtcgggaggtttccaagcctgagtacgtcgggtccgccggtacgatcaatgacgacagcgcgcatgctcttctccatgggcttagcttgcggacaggtcgtggctcaggccgggatgtgcccaggacgggatcacgggcggcggcagcatgcccttgccatccagcgtatggacgtccagcccgtgcgccagggggaagtgcaggctatgggcgatgtggccggtgcgcagccgggccggcacgctgcagagtgcaagcgccgtttccaccaggtactccaccggctcggtcggatagccgtccgggatatagcgctcgctgcctggcgtgaggatcgccgtgcttggcgctaccgaattgaccgcgatattgtcggcctccagttctgccgccaggccctctgtgaaccggttgatggcagccttgaccgcggcgtaggccgtgaccccgccagcccggtcaaagtcttgatacgggcgagcaggcgacagggcggtgacggagcccaggttcaggatccatcccgcgccgcgcgtgcgcagcagcgggatcgctgcgcggctgagcacgaaggggatgcgcaggtagtgctcgaccgtcctgtcgaagatttccagcggcatcgattcgatgccgctgtattccgccatgccggcattgttgaccaggatgtcgagaccgcccgcggcgcttgccgcccgcgccaccaggttgtcgcgctgcgccgggtcttcgaggtccgccgccagcgcgatggcactgcccccttgccgcctgatctggccaaccgtctcggccagcgtgccaggttcgtcctcggactcgcctgcgcgccgtgccgtggcaaccaccagcgcgccctccaccgcgaagcgctgcgcgatggcacggccgatgccgcggctggcgccggtcaccagcgcaatctttcctgtcagttttccgtgtgcggtcatggcgcgtattcctctgtgcggttgtggttggcaatcaggcttgtcgcgagcgggcagaaggcgtgggagatcgcctggactgtccattcgggaaactcggggtcgaaccatcggtcgacgcggccccaatgaaaggggtgcatcaggtattcgcccagcaggtcgtccgcgctggcgaactcctgctgccagacatgggtccaggtgccgggcgacaagacgcgggcaaggcgccagttgcggatgccgggcatgtaaccgggcatccgcagcaggtcctgctcaagtgcgcggacctgccggtccggcgcttcaggccggacccggaacatcagcgtgcgccagatcccgtggcgcagctgaggggcgcgcagaccgcccgagatcgggtgataggcgacgctatccacctctgccatgccgtccagcgcggcagccaggccggtgccgtgaccgggcgagccggatgcagtcgcgccgaatcgcaggtcgagcgtgtagtcgccagcgccccagcttcccgccaggtttcggccaatcgccacatggcgcaggcccggcagtgttttaacgcgggcaagcaaggcttgctcctgtgtgcacgtcccggcgctgaagccggcgtgcaatcgcacctgtgctgtctcaagccgcatcgccatgctccttgcgccggggccgcgcagctgtcgcctcggccatcacatggcggcggcgggcttcacacagcgtgccgactgtcgaccagaaggctagggccggagcatcgatgcttgcgcgcatggcgtagtaagccggcgcatccgccacttgccacagcagccacagcgtattgggtgcatcttccagcgccacgggcggcgacacccagcgctgcagcagtgccaggcccctggcggcgctgccaggcaagtactgactttccagcaggctcagcacagtgggcaggtgcccgggcgcgagcacgatttcatcgaggatgtggatcattgtgtgtctcacgcggcgcaggcagggcagcagggctgcgatgccggagccgcgggtttgcgggagggaagcgcggtcattgggttgtcccgtataggcatggtgttcatcgcatggcaacctccatcgcccaggccgtgcgcaagctgtcgcgcgggtggaagtgccgggatgattatgggaggccaggtcgcaccggatccccacccgaacgatcaaccatcgctaccgaagcaatcacgaccagcgaccatgaatgcccacataccggggaatcccgtacctgttccgcacggcatggtgcagcgcctgctggacgaactgaagcggcagggcgtcgaggtaccacctgccgccggcgcatccgggcatgcgccgcccgccaggttcaccgcgctctatcgcgccgcgatcgagcggctggaagccctggtcgccaaaggcaacggccatccccccatgcgcaagcaggaagtggacttgctgtgccgttgcgtcttgagcagccagacgctgagggaggcgatccgctgcgctgccgacttctgcgcgatgctgtatccgcgcgccggtgcgctcagcctcgggcaaagcgcagggcaggcggtgttccgcatggattcgctgcggcgtgcgaactcctccgcggcttgcctggtggacctgaccgggctcttcttctatatgctgctgttcggctggctggtcggccagccgctgcgcccgacgcacgtctacctggcgcatccccggcgcgaggacgccatgcctttcctgggcttgttccatgccgcggtcacgtccggggcccagacctacggattcgaattcgatgaggccttgctcgaccggccggtcgtgcgccaggccgcggagctcgatgcgttcctggaagactttccttaccggctgatcggtgcgccggtcgaggtcgtatcactgagccagcaggtgcatggcatcctgcatgcagcgctggtgcatggcgcgcggctgccaacgctggctgaactggccatgcgctttgacgtgagcgaaccgaccctgcgccgccgtctcgctgccgacggcagcagctaccgggtactgcgcgaacacagcctgcaggaatacgcggaacaatgcctgtgcacgaccaactggccggtaggaagaatcgcggagcagcttggctttgccagcgaggaagcgtttcgccgggcgttccagcgctggaacgggcatgcgccgacgcgcttcaggcgggaaagcaggggtgaggtggtgaacgggagttcgtgaagcggtaattccagctgtcggcgacagagaacaggctgcgcgcgcccgttacctgcgacgcggcagacgcacgtcaaacgcggtccctgtctggtcggagcgcgcctcgatcgatccctgatgggccttggtaatctcgctcactatatacagcccgagtccgaggccgtccgcgtttttgtgctcctgatccgggcctctccttagcgggtcaaaaaggcgctgcagcgacagcgggtcaatggcgggaccactgttcctgacctcgagacggacttccgcgtcatggccggtgactacaacgcggaccggctcgtccggcgcgccgtaccttatcgcattgagcaccagattagaaagcagttgctgcaggcgcggaccgtcccaaataccctgcacgttgtccttcacctcaagatcgatgcggcgggccggatacgccgcacgcaactggtccacggtatcggcaaccaagtcagccagatcgacgtcgtcaggcgtgatgttgatacccaagccgagttttgttcggttgaaatcgcacagatcattcagaagagaattcatgcgggaaccacttcgaatcagccgggctgcagcttccgataccttctccccagcgttcagcgcgccagatatgtggcggtcgtctggatggtctgcagtgggctgcgcatatcgtgcccaaccatgccgagcaacaggtcgcgagcctgctctacctccgaatggaaaaaatccacggattccgcgactgcctgatcgatagcctcgttgaaccgcattacttcgtccagatccggggcggccggctgacattcgtcaatccacaaacgcagcacgctggcgcgcagcgcccggtattcagcgaccagttgattgatgttgaagccaccgcgcgcgcgcatgagggcgtgtgattgtgcggcggtctccggcgcaccgagtagcctgggggcctgccccattgattttttgcgttgagcttccctcgtttgcggggtcaacaaatccttcgccacggcttgcaggatctgcggtgcgtggtcacgcagcgcgagggagtccatgcttcttgcggcaggcagcagggtggtcgcaaactcctcccataccgccacaatgcgccctgtattccgcaagatgaagtcagctagtcgcatgtctccccctgaagcaactgagcaagccccggaaatgcactcttgagaatttatcttaggctagttgtcagcggttccaagtagcgtcggaaacggcctggaatgaccgattcggcacaaacgtcggttgagccgtgggggcgaaattcgtctcccgcagatccctggcggccccgttcaacgccgttgcaggccgccagacctgtgcttcctgaccgcacgcagcaccaggcccgccagcaccgcgacgaccgccaggatgccgatggcgacaaagaaaggtaagggccggtcgattgccaggctttccccggcgacgacgatacccaacgcatagcccgcttcggcgatggccatcgcggccaggaatttccggaaggggtaatgcatggagccgaacagataaccgggaatttccgacggaaccgcgatacagaacagcagcaccgcccagaatttcatgcgctgcgatacgtagtcctggtatttcgcgagcttgtcctcgtaaccgctacgggcgagcaatggataagccaggcggccgatgccgaaggcggccacagcgcccagcagccagccgccccagagcagaacaatggtgagcggcttgccccacacctcggtggccggcggcaccaggaccacgctcgaggcgaaggcgagcatggcagacacggccgagaacaggaagaagaccagcgcgcctgccgcggggtgctgttccatcgtcgcccgcgcccaatcgatggcctggtcgacgaaggccttgaacggaggcgacaggacgaccaggccaatcagcaccgtcgcggcgccgactgcaagccagaaccagacggggcgccgattggcagacaatttgctcaccatacgaaattagaaccgcaggccgggccaaagtttcgaggtgattccccgaggcccggtccgcgacacccccgaatacgatgcgttcggccccgcctcagtcttccagcttcagcccggtcttcttgacgaagctgtgccagcgctcgtattgctcgcgcgcatagcggtctacggtgggaccatcggtggccatgacctcgaagccggccgcggtcagctttcgtttggtttccgggtccgacaatgcggtctggaaatcttccgtcagtttcctgacgaccgcaggtggggtggctgccggtgcgaagatgccgatccacgagtaggcctcgaagtccgggaacccggactcgatgacggttggaacatcgggcaggtcgggcaggcggcgcgcgcccgtcacggccagcggcttgatcttgttggcagagatctggcccttcagggccgcatagctcagcagcgtgatgctggacacattgcccagcactgcctggaccgcgggacccccgccggcgtacggcacgtgcatcaactcgacccgagcctgccgcttcaggtcctcggccacaagatggttcatcgagccaagcccggtggaggcgtagctgtatttggacggctcacgccgcgcagcgtcgaggaagctgcgcaggtccttgccaggaacggtgggcgatgcgccgatcacgagcgggaagcgcacggcaaacgtgacgccagtgaagtccttgaacgtgtcataggggagcctggacttcgccacggggttgattgcatgcgtatcgaaggcgaccagcagggtattgccgtccggcgcggatcgagccacgtactgggtagcgacctggctggctgcgccgggccggttttcgatgaccacgggccgcccggccgcctccgccagtttcggctggatgatgcgtgcggcaatgtcggtgctgccgccgggcgggaaggtgaccaccagcttcagtggcgtggcattgtcaggccctgctgctgccgttgtcagcggcagcagcaggcaggcaagggccaccacgccggcaccaagcgctttctggcggcctggtgccgcaagtcggctagacatagatacctctcccatcgttgagctttggttcggatcagataagcgttctggacatggcctggatgtcagcccatccactggctcacgggtgcggcggtgtcctgcagttcttgtgaaatcacgtcgaccagcgccggaccatcatgctccagcgccgcgcgaatcgcggcatcgagctgtcccgggtcttccacgcgccaggccttgatgccgaacgcctcggcaacgcgcgcgtggtccgtgcggctgaaatcgaccgagaagtagcgttgttcgtagccggccttctggcttgccttgatccagccgtagacggcattcgagaacacgatcatcttcagcggaatcttgcgtcgcgtcagcgtttccatctcgccgcaggtaaagccgaagctgccgtcgcccatgaccgataccacggtcgcacgcgggcgcccaacggccgcgccgatcccggccgacatcgagaagccaagggcgccgtgggcccggttggtgatgaaatggcgcccaggcttgctggcgttgtaatacgcggagaaatacgggcagggcgtgccggggtcggccaccacgacggcgtcatccggcagcagccggttgagggcatccaccacgcgttccggcttgatcggcacatcgagcgaggctgccagcggtgcgaaggcggcaagcttggcggcacgcgcggcaccggccagcgcggcgccgtcggcggcgtcggacgggcggtggggcaggcggtcgctcacggcggcgttgagcgccttcagggcgagcagggcatcgccaaccatggcgacgtcagtgcggtagttcgcggcaatcaccatcggatccgcatcgagatgcaggattgcgatgtcccgcgacgggaagcgccaatgctcggtggtggtcgagccggcgcggcaaccgatgaacagcacggcatcggccttggcgacgatctcgcgcgtggccatgatgccgccattggcaccgaccacgccggtattcagcggatgggtgtcggccaggctgccttgcccgctgacggtggtgcagaccggggcattcagcatgccggccagcgcttccagttctgcgcaggcgccagagatgaccacgccaccgccgcagatgatgaccggcaggcgcgctgcgaccagccgctgcgctgcccgttcgatctcggccgggtccggcgcatagcgcatggcagggaagcggtcgtggccaggctgcgcccatacctcggcagcatccacctcatgcttctgcacgtcgtatggcaaacacaggtgcgcggatccgggcttgccggtggtcatggcgcggaaggcgccgcgcaccgcgcccgggatctggtcggcgcggtcgattgtggtattccacttggtgagggggcggtacagcgcttcctggtcgagttcggtcagggggtacttgccgcgcgagccgaccgatacgtccgaggtaatcccaagcacagccactgaagactcattggcctcgaccagacccggcagcaagtaggtggctccgcccccactgggcccctcgcatacgccaaccttgccggttacgcgggcataggcgtcagccatgtagccggcgctgcgctcatcgcgcgtcaggatgtggtcaatcccatggtcgaggcgggccatggcgtcatagaagggcaggctggtatcgccgcacagcccgaagacgtgctttacaccattcagttgaagcattcggaccatggcttcagcgccgttcatcttcgtcattccaggagtctccaagtcagtgtcgagcaggcgagataagaatacactgcaggatacaattaagtatacttaaacttgaagggatggatgcgtcacctgaaggctcggcagcgtcgggtatgatcgcggccaacgaggaatatctatgcaagcaaccaacggcatgaagccgctgatctccgctgtcaggcgcaaacggggatccgatgtcatcagtcgattgcgcgagatggcgatttcctacgagctcaagccgggcgaacgactcaatgagatcgaactggcggaacgcctcggcgtgagcaggacgccagtgcgtgaagcgctgacccggcttgccaccgagggcttcctggtggagtccagccgcggctatgtgcgccggccgctcgatatccaggaaatgctggacctatacgaagcacgcgtaacgatcgagcgcgattgcctgcgcctggcgttcgagcgggcctcggccgagagcatcgaggagcttgcgcgatacctcgagcacagcaagtcggtgcccgcaaataccccgatcccgcaactggtggaactggacgaaggttttcacctgcgcatcgccgccatggcgggcaacgccgaactcaagcggatgctggtcagcctgaacgaacgcatccggtttatccgctggatcgacatggagaatatcgggcgcgattccacccagagcgaacacgctgaaatcgttcacgccttgcaggcccacgactgggagaagggggaaaaatgcctgacttcgcatattgccttgcggcgcgagcagatcgtcgaggccattgcgaaaggcctcaccaggatctacctggccgaacagcgctagcggccagccaatgccgccccatcgggcagcctaagctgtccgggccggtgcggtcaggctcccgccatcgtttccgcactgacttcccatcctgcgtcaatgccaccgggcagcatctggccacggtcctcgccaacctcggcatcaatcagctgattcagcttttcgttcatggcgactagtagttcccgttgcttttcgcctgccgccaggttgttcatctcgaatggatcggtctgcagatcgtacaactcaacgtcgttgaaccggtagagctcctccagggtcgtcggcttgttatgctgcctgggggaaaaataccgtgcaaagctgtagcgtccatcgtagatcgaacgcactgcgccgcgcttcatcaggtccgggcggataccggcctgcttgagctggtcgggcttgccaccgccctgcagatgggcaacagccttgaaaagaaaatcgccatccaggtaggccagcatgttgtagcaaaacagcgcgccatcgcgaatggcgtttgcttcggctgccccaggctttgcgagcaagcgggaaaaatcctttcccggtaatcccttgacgatggctgcgcgcttgtcagtcgcgacgccagtcaatgcaaccagggtgggcgcgatgtccagatgcgaggtgacggcgcgacactgcttgccaccgtgataggagggatgggcaatgaccaacggcacgttgttctgctcccgataggagacagcgccttttgcatggagctggtgggcaccgtccatgtcaccgtgatccgatgtcaggactacgatggtcttgtcggaaagtcctgcagcatcgagcgcggccaatacggcagcgatattccggtcgacatcgcgcatgcagttcaggtaatagttgtgccgccggtgccagcgcgcgtcttcatttggaatggctccgaccagggcgtcgtgcgagcgcaggaaatcgcggtgtgccgcagggcgccccggcgcgtcaagcgcctgtttccggcttgccggcagcatgaattgccactgcttgccgtatagcgggtcggccgggtcgcgcgcgacatgtgcgaggccgcgcattgcctgaacctcggtgccgggcgcgtcggtgtcgtagaacatcacgtcgtgcgggttgacgaggttgacggccaggaaccatggctttccctgtgccgcgagctcgctccctttcccgcgcagccagctcacacccattgctgcaatcaccccgtcgtgcaggtacccaccgctggtgtgggcaataatgtcgccgattccgatgtagtcggaaaagccataggcttccatttcctgagtgaagatcttggttggcgtgccaagcttgttgacggtttcgaattccttggtgaggtgccacttgcccttgtaggcggtgtaatagccggcgtcacgcagcatgtcaccgagcgtccgtatttctgttgacatgctgctaatccacgggaagttcgtgttgtcgaacatccgggtgtgctggatgtgctggcccgtgtacagaactgagcgggacggggtgcaaacacatgaatttatgcggtgattgacaaaggtcgtaccgcgcttcatcaagcgttcatgtgcaggcaggccatagcccctgggcaactcgccaggtcggaagtagcgctcctggtcaacaaggatgaacaggatgttgtacggtcccgaaggcaggctcccagcggcctgggccgcgtcgcttgccccggctggcgcatccttggcatccgcgcctgcgccaagacccagggccatggccccaatcccggtagtcaggaggaaatcgcgccgcgtcaatgtgccgccaggcttgtcgtcgttgctcattggcttctccctgcctgattgcgcggcccatggcgggtggacgctgtgctgccgcaggcccgcccaggcatgcgtaagacagtctagcaagcgcactttttgccgccaaggcagcgtgcggcgccggcaggaggcgatggttggcaaccacacacattcgcggctcaggcagtcgaactacgttccgcagatgatcggagtgcggacaaaattcccgacaccctgggactgcgctttccggttcacgacatatcctcgatgggatctcgttgcgagcgaatctcctcaggactgaggacgatatagcccagcgacttcagcaactgcaccgcctccagctctgcgtccaggtacaccggccgttccgggcggcgcgggcgcggcgcggggggcagccacgcggcgctggcttgcacggcgggcgctccctggccgtcagaccatcgcgcggtcaggatgcggcaatgctccaggttgggcttccaggcaacgtccacggcggcattgaacctggcggtgcaaagccgcaagcgcttcagcgccttcagccagttgatgaaggcatcacgctccggtggctggtagcccttcagcaaggtagccaggctgtcctgtgcagtggcgctgtcggccgcctggtcgtcttcgagcagggctagctcaagtgccacgtgctggcggccgtcgtggtcatagattgcgcagtcggcgtccagcacgccttcgcgcagcagctcgcacagcagtacccaggcccttggattcttgtcgaaccggccttcgagggtcgggtcgatctggctgaggatctccgggatcgggcgcgcctcgcctgactggatggccagggcgaatgccatcgcgttgtctgacggcctggcaccgcttgccagcatctgcaatgacgtttcccagagttcgcggatttctgccgcggtatccacggcatgcatccatgcatagtcctccagcgccgcgcacagcctgcgcgcaggcctggccagctggccggccagcgtcctgataaaccccgtgcaatgcgcgcagcggcattccagccggcccgcatgcaggaaaccggcgtacagccgttcctggtgtccgcagtgtgcgcattcgagtgaaaaaccgccttgccgtgccggccgctgcgaggccagcagcccgtcgacctgatagtgcgccagtccgtcgcagcacgggcagatccattgcagcttgtgcgcgccgtcccgaggccgcgcggcccggtcgaactggcgctcgatggcgctgcgcggaattccctgcgcgcgcccgaccacgtctgcgctgtagcgccaatagcagtacgagtgggcggcagcggccacctccggagagaggcgctgcagctccggcagcaggcgggggctgtgccggatctcgtcggccatcgcatcgatcagcgctggcccgtccggcatcaccgcctcaagggcggcgcggctctgttccaggaaatcgggcacgaagacccggcggatatagtcctcgttctcgagccagaacaagtggccggggagggcttccagtacatcaaccccttccctgacttccgacatgccggcgcaggcgagaaacgtgaacggcttactgaacaggaaagcgtctgtcatgttgtcgtcaacggagaatcccgcccacgagctggcaatatgcctcgtgtgcgatgggtcaccaccccgtgactcggccaagcaagcgcacggaaagcgcaatccggatggcgctttccgttccggggacttcccccttcttgttttcagatccgtcggacctgtgcggattttgcatctgccgcattggacagcataggcgaacctgacgcctcgttacagaggaattccttttcttgacgtcctcgtcctacggccagggagaccagcccgggcgctgttgtcatcctgattcaatcgctttaggacccgcctggccttgtcctcgcaatcttcaccttccctgttgccgttgatctcgtcgatcagtgcgcccgcgctgcggtcgatcacctggaggaacaagatgccgggctccctggccaatggccgtcgtcaaattccagctcaaacggctcagcgaggggcgtgtcacggatccacgcatctcgcccctcacggcgccagtgttgcagcacctcgtgccagacgcggcgctatcgcggatagacgacgcagagggccggtgctcggcatgtcgcaggacacaatggagtgacctgcggtgccttttctgaacccgctacctgccagtattctgtctcgatgtgatcctttcgatcaaataaatgattgaactagtcaaattcagtcagctgcactacactctgatgatatttgatcgattcgatcaaatgtttgctcgaaacatacaaggccgcatcctcagcggcaggagacaaccatgcagatttctatcaaacgcgccatcgagcgcgtgcccggcggcatgatgatcgtgccgctgctgatcggttcgctcgttgccacgttcgcgccggatgggccgaagttttttggatcgtttaccggcgcgctttttaccggtgccctgcccatcctcgcggtgttctatgtctgcatgggggcaagcatcaacatcaaagccacgccttacattctcaagaagggcggcgtgttgttcggcaccaaggtcggcacggcaatggtgttgggcgtgatcatggggcacttcctgggcgaggcgccgatcagtgccgggatgtttgccggcctgtcgacgcttgccgtggtggccgcgatgaacgacaccaacggcggcctgtacatggcgctgatgggccagtacggcaagcctgaagacgtgggcgcctacagcatcatgtcgctcgagtccggcccgttcctgacgatggtgacgctgggcgtggcgggtttgtccgcgttcccatggccgacgatggtcggcagcattcttccgctcatgctcggcatgttgctgggcaacctggatcgggagatgcgcgatttcctgggtaaggccgtgccggtcatgattccctttttcgcactggcgctgggcgcaggcctggacctgcacaaggtctggcaggcgggcatgctgggcctcggccttggtgttgccgtggtggccgtcaccggctgcgcgctgtacttcgctgaccgcctcaccggcggcacgggtgtggcaggtgtcgcagccgccagcaccgccggcaatgccgccgccgtgccgacgctggtagcggcggctaatccggtctacgcagaatcggccaagagcgccacgatcctggtggccgcctgcgtggtggtcaccgccgtactgacgccattggtgaccgcctggattgcccgccgcgtggcgggcaaggaggccgaggcgttggtgaggaccgccgcatgagctggcttatcatcgccgacgacctgtcaggcgctgcagactgcgcgatcggctacgccatgtctggcgcccggaccgttgtaacgctggaggcggcgcctgcgggcgcggacctgtcgcaggccgacgtagtggcttgcgacgtcgacagccgccgcatggcgccccaggaggcggcggcgcgcaatctcgaagcctggcatcgcggccagggcgccagccggcggctgtacaagaagatcgattccacgttgcgaggcaactgggctgccgaaaccgcggcgctggcgccgctggccggccttgccatcgtcgcgccggcctttccggccactggccgcaccacggccggcggctgcatgttcgtgaacggccagccgctggaagactccgacatctggcgcctggaagcgcttaccggacgtgccgaccttgtcgcgctgctggccgcgcgggggctgcgggcgaccctgttgccgctggacacggtgcgtgcgggtgacgcgaccctgcggctaaccatcgccggactggcgcgcgaaggtgtgcgggcggtagtctgcgatgcgcagacggagcaagacctggcggcgctcgccgcggccacggcgcagctcgacgtccccgcattctgggtcggctcgggcggcctggctcgtgcgctggctgcaccatgcctgttcgagggcggtgcgccgcagccgctgcctgcccctgagggcggcccggtcttgacgctggtcggcagcctctcgggcatctccgggcgacaggccgcttgcctgcgcgaacgcaccgggatgcagtcgctggtggttccgccgcggatcttgcgtgaaggcgcgggccacgctgactgggacgccgcgcagcaatcgatcaccggatgcctgcgggctggccgcgacctgctggtcagcattggtcgcgacgacgcgttcgacccgggcgaagggccgcgcctgagcgccgcgctggcgcaattgtccctgcccggcttccagcatacgcgcggcctgatcgccaccggcggcgagacggcccgggccatgctctcggcggccggcatcggcgccctgatgctgcggcgcgaagtcgagcccggtgtgccgttgtccgacacccctgcgctgcccggcgtgcccgcgcgccgcgttgctaccaaggccggcgcattcggctccgaggccgccctgtggcatgcctggcaggctatgactgaatcccgcgcgccgtcagcctgacggcgcgccgcgccacactcgacaagagacacatcaatgagcgactacctccccgtcatcggtatcaccatgggcgatgccacaggcatcggccccgaagtcatcgtcaagagcctcgcgcatgacagcgttcgtgcgcaatgccgcccgctcgtcatcggcgacgtgcgccggctggaagtggccggccggctcgtcggctccccgctcaagctgcgcgccatccaggccccggaggaagcgcgcttccagtccggcaccatcgactgcatcgacctgggcctgatcccggaaggcctgcccttcggcaagctgtccgccgtcgccggtgatgccgccttccgctacatcgagcgcgcggtggcgctcacccgcgacgagaagatcgatgcgatctgcacagcgccgctgaacaaggaagccctgcacgcggggggtcacaagtttcccggccacacggaaatgctggcgtacctgaccggcaccccggaggtgtcgatgatgctggtggcgccgaagctgcgcgtgatccacgtcaccacgcacatcggcctgctcgacgccatccgcaagatcgagccggggctggtccagcgcaccattgagcgcggccatcagacgctgcagcgcgctggcattgcagcgccgcgtatcggcgtgtgcggcatcaatccgcacgccggcgagaacggcctgttcggccacggcgaggaggaggaaaaaatcatcccggcggtcgaggccttgcgcgcgcgcggccgggacgtggaaggtccgctgcccgccgacacgctgttctatcgcgccggccgcggcgacttcgatctggtggtggcgatgtaccacgaccagggccacgggccggtcaaggtgctcggcctggaggccggcgtcaacatcacggtgggcctgccggtcatccgcacgtcggttgatcacggcaccgccttcgacatcgccggcaaggggatcgccgacgaacgcagcctgctggaggcgctgcgccagggcgctgagctggccacgcgccgcgcctgagccatcggcgtacgccggggctgccggctcctgtaagatcggggatcgttgaggatcccccattttcatttcgcctgccatgaaagccgccgaccgccgccgcgccattctcgaactcgtgctctcgggcgaggtcgccaatgtcgaacagttgaccggcagcctcggggtatccgtggccacggtgcgccgcgatctgaccgcgttggctcgcgagggtcgcattgtgcggacctatggcggcgccgccgcgctgatgcaggtgggcggccacgagccagaggcttcgcttgaggagcgcaagtcgctgcagcgtgagcagaaggaagccattgcccgcctggcggcgagcttcgtgcaggacggcgacgccgtgctgctcgatagcggcaccacggccgccgcgctggctcggcagctgggggcgcgcgaggacctccatgtctataccaccaacctgctggccgtcaccgcgctcaccggcctgcccggcatccgcgtgacgctgatcggcggcgacgtgcgcccctccagcatgggcaccttcggtccgctggcccaggtaacgctgtcgcgcatcagcgtcgacaaggcgttccttggcgcggacggcgtggttgcaggcgtggggctgtgcgaagccagcgcggagcaggcctacctgaaggagtgcatcgtccgccaggcggccgatatctttgtgctggccgacgctaccaagctgggccgggcacagcagcagcactggacgccgctcgaccgcgcatggacgttgattaccgatgcggcggccacggccgagcagttggaaccgttccaggcattgaagcaggtacgtgtggcggtcgcccccgactgattccccgcgcgcagctgctgctgagaagcgctaattctgcgagcgacgccccgtcaggtgatcgcgccaagctgccagggaacgaactcgttctggccgtaaccgtgcagttcgctctttgaccgctgtcccgaagccgtcgccagcatcaggcggaagatctcttccccaagctcgtcgatcgtctgcgagccatcgatcacggtgccgcagttgatgtcgatatcctcctgctggcgctgccacaaggcagtattggtgccgagcttcagggacggggacggtgcacagccataggcggagccgcgcccggtggtaaagcagatcaggttggcgccgccggccacctgcccggtcgccgagaccggatcgtagccaggggtgtccatgaagaccaggccagccgcctccaccggctctgcgtagcggtatacgtcgaccaggttggtggtgccgccctttgccacggcaccgagcgatttctccaggatggtggtgagcccgcccgccttgttgccggcggacgggttgttgtccaggctggcgttcatgcgcgtgcagtaggcttcccaccagcggatccggtcgagcagcttgtgcccgacttccggcgagacggcacggcgcgtcagcaaatgctcggcgccatagatctccggcgtctccgacaggatggcggtacccccgtgcgccaccagccggtcgacggctgcgccaagcgcgggattggcgctgatgccggaatagccgtcggagccgccgcattgcagtccgaccaccaggtggctggcatcgacgggctcgcgtcgcacccggttggcgtcggtcagcatcgccttgatctgctcgatgcctgccgccaccgtacgggccgtgccgccggtggcctggatggtcatggttttcagcgcggcgccgcgcgccagtccctcgctgtcgagcaggccgtcgatctggttggtttcgcagcccagcccgacgatcagcacggctgcaaagttggggtggcgcgcatagcccgacaacgtgagccgcagcagcgccaggccttcgccttcgccatccaccgcgcagccttgcccgtgcgtcagggccactacgccatccacgttcgggtagtctgccagcgcatgcggattgagctcgcgccggaaatgctcggcgatggcgcgtgccgcggtggccgagcaattgacggaggtaaggatgccgatgtagttgcgcgagccgacccgcccatcggcgcgaacgatgcccatgaattgcgcgcgctgcgccgcgaccggggcagggcgcttaccggtgccaaacgcgtagtcgcgctcgaactcgccgatggccaggttgtgggtgtggacgtgctcgccaggcgcgaccgggcgagtggtgaagccgatgacctgtccgtagcggcgcactggcgcgccagcctcgagtgcgcgcactgccagcttgtgccctgcgggcaccaggccgcgtaccaccaggcctgcgccgaggcgcgcgcctgccaccagttgcgcacgcgcgatgacgacatcgtcatccggatgcagccgtatgacgggttcggcggcggttgctgcttcctgttccaggacgacgctcatgctgcggcctccagatcgtgcgcgccttgcagcgcggcgcgtgtcggcacgccgtcgaccaggcgcggcagctgccacgggttacggtcgcgcaaggccggtgggagcacggaatcgggatagttctggtagcacaccgggcgcaggaagcgctcgatggcagcgctgccgacggaggtgccgcgcgcatcggtggtagccgggtaggggccaccgtggacgatggcgtcgctgacctccacgccggtcggataaccgttgaagagcaaacggccgaccttgctttccaatagctcgatcagcgcggcgtggtgatggaggtcaccgtcgtcggccatcagcgtggccgtaagctggccgcgcatccgttcggcaaaggccaggaagtcattttcggaatccagcgcgacgatcaccgtcgacgggccgaatacctcctcctccagcggacgattttccgcaaacagcacgctgcgatctgccttcagcagatgtccgccaatgcggccgtcagcttgctttgacaccaggacttccacgccggggacttcgcgcaagccggccagcccgcgctggaaattctcccggatgtcggcgcccagcatgggctgcggttcggccagcgccagtgccgtgccaagttcggcgacgaacgcatcgaatgccggtgagcggatgccaagcaccacccccgggttggtgcagagctggccgcagccgaaggtgaccgaggccgccagttcgcgcgcaatctgcgcgccgcgcgcggacagtgccgagggcatcaggatcaccgggttcacgctcgacatctccgcaaacaccggaatcggatccggcctcgagtgcgccagatcgaacaaagcccggcccgcagccagtgatccggtaaagcctactgccttgatgtgcggcgtccgtaccagtgccgccccggcggctgcggtgccgaacaccatgttgaagacgcccgcctgcgcaccgcagcgcgcgatcgcgcgttcgatcgcattggcaacgtattcagacgtgaccatgtggcccggatgcgccttcaccaccaccgggcagcctgctgccagcgccgaagccgtgtcgccgccggccaccgagaatgcgagcgggaaattgcctgcgccgaagaccgccaccggacccacgccgacgcggtactgccgcaggtcgggtcgcggcagcggctggcgcgcaggctgcgcgcggtcgatgcggacatcgaggaagtcgccgcgccgtaccgtggccgcgaacatgcgcagctgattgctggtgcgcttgcgctcgccttccagccgcgccggcggcagggcggtctcgcggctggccgccgcgatgaacgcctggtccagcgcatcgatttcatcggcaatggtctccagcagcgcggcgcgttcggccgggctggtggcgcgcaatgcggggaaggcctggtgcgcggccagcgcggctgctgtaacttcggcttcggtggcttcctggaagctgaccgggtgccgctcgccggtcacggcgtcgatgctgaacagcggggtgccggcagcacggcgttcgccgccgatgtagtgaagtccgaggatggtcatgtcagggtgttttggtgcagggaatacgggacacagtcaggccgcctcggaggagccaagccgcaatgtcgcggtgcggcgggcccgtgcgccgatgctcatcagcagcagcacaccgaccacgcccgcgatggccagggccagcatgcccgcttgctggctatggaatgcggattcaaccgcggtcttcagcgtcggcgcgataaagccaccgagattgcccagcgcaccgatcagggcgatgccgctggccgcggcggtgccactcaggtacgcggtgggcagcgtccagaacagcggctggaccacgacaaagccgacggtagccaggcagaacgccatcagcacgggcaccagttcgtgccccagcgtcgacagtgcgatgccggtggccgccatggcgagcatggccatggcgaattcccgttgcttgcccctggcatccgcgatgccggtgatcaggcgcagggaaaccagcgcgcacagccacggaatcgcggtgagcaggccgaccttggcaccgatcgctgtgccggtcagctcggaaatacgcgtcggcaggtagaagatgacgccgtagacgctgacctggatggcgaagtagatggcgacgaaacgcagcacttgccagttgcccagcgcgctcagtgcggttgccgggccatgcgcggtcttctggttgtcttccgcggcgatagcggcttcgagcgcagtcttctcgtcggcgttcagccacttggcatcgcgcggcttgctgaccaggtagaagaaggcgatcacgcccaccacggacgccgccaggccttcgatgatgaacatccattgccagttgcgcaggcccagctggccacccatcacatcgagcagcagccccgagaccggcccgcccagcaccagtgccaccggcaagccgaagtagtagacgccgagcgccttgccgcgctggctggcagggaaccagtaggtcgagtacaggatcacgcccggcgagaagcccgcctcggcgacgccaaggataaagcgcagcacgtagaacgaggtctcgtcatgcgcgaacatcatggcggccgacgccagcccccaggtgaccatgatgcggctgagccagaccctggcgccgacccggtgcaggatcaggttgctggggatttcgaagacggcatagccgatgaagaagatgccggcgccaagcgcataggccgcgttgccgatattggaatcgaccatcagggcttgcttgacgaagccgacgttggagcggtcgagcatcgacagcgcgaacatcagtgcaaggaaaggtgcgaggcgcaggcgggccttgcttaccgcgcttgcgagcggatctcggttggcagcttgagtctgcatgggttgtctccggtacaaagccgcgtggcgcgggcctcatgtcatggattgcggcatccccgtcttttgcttgcgcgagggtagctgcggtgttcagggcggggtccgtggcgcccgttcagaaatcgccgttcagaaagtggtgtggccacgtgcggccaggttggccatcagggcgcgtacgccgaacgtccacggagcgatacggtcgctgcggcccacgcggttgaccaggctgccgagctggcggctggagatggtgacaagatcgccatccttgtgggtgaagccgccgcccgcggtgtcgcggtcttccaccggcgcgaacagcgtaccgaggaacagcatggcgccatcgggatactggtgggtcgcccccattacctgctcggccagctccagcgggtcgcgcgtgatctggtccatcgagctggtgccggacaacacgaagccatccaggccatcgacgcgcagatccaccgtcgcccgccgcacgtcgtcgagcgagaggctctggtcgaacaggcgcaggaacgggccgatcgcgcaggatccgttattgtccttggccttgcccagcagcagcgcactgcggccctcgaagtcgcgcaggttgacgtcattgcccagcgtggcgccgagcacatcaccgcggctgttgatggccagcacgatctcgggttccggattgttccatgccgagccgggatgcaggccgatttccgtaccggtgccaagcgccgaaagcagcggtgccttggtgaagatctcggcgtccgggccgatgcccacctcaaggtattgcgaccacatgccatgctcgatcagcaaggccttgagttcgcccgcctcgcgggaacccggccggatccgggacaggcgctcgcccaccaacgcctggatccggttgcggacctcggcggcgccttgcgggtcgcccttggtctgctcttcgatgacacgctcgaccaggctgccggcaaaggtcacgcctgccgccttgatcacctgcaggtcgcatggcgccagcaggcgggccacgctgtcgctgccgcgcggatcggccgtgttggccagcaggtcgtcgagcttgccgatccagcggccgggcgtattgtgcacgaccgtcaccggatcgccctgttcgagcagggtgctcatggtcggagcgacatccgatatgtcgaataccccagccggccgcaggaccacgacagccgggccggccggagcgccgtcactggccgggatccatgcgcggccgaccagcgtccccgccagcccgtcggcaggaagcgtttgcgttgcgctgagcgtgagcggcaatgccatcgattgtctccacctgatgttgttgtcatgagcgccgcgaccaccgcggcgtcgggtggaactctacgtggcagtcccataaacatccaatcgattattgggtagaatcgattccgtttagttattgattcagccgggtttacccccttcatggccagacagactgcttccgccccttccgccgtgctcgccaagctgcgcttccggcacctgcagctgttggatgtgctgggacgcagccgcaacctgcgcatcgcggccgagcaattgcatatcacccagccggctgccacgaagatactgagcgatattgaagacaccctgcaggccaggctgttcgatcgcttgccaagggatatgcgcccgaccgaattgggcgagttcgcgctgcgctacgcgtcgacggcgctggccgagctcggcaagtttgtgagcgagctggaagcgctacgggccggcgggcacggccacctcaccgttggcgcgatttcggcgtcggccgcgcaggtggtgaccacggcgatccgcgagatcctgcagcagcgcccgcggctggtcgtcaagctgatcgagcagagcagtgaccagctcgccgtctggctggaggaccggaagctggatatcatggtcgggcgtctgaccgagccacggcaccaggcgatcttcgatttcgaggcactgtcgccagagccggtatgggtcgtctgccggccgggacatcccctgctggacaggcccacgctggaaattgccgacatcggcgcatggccgtggatcctttacccgcagctcaccgccatccggcaactgttcgatgaaaccattgcggcggcaggcatccagggcctggtcggcatggtggaaacaccgtcaatcttttccaccctggaactgctgcaggcgacggatatgctttcgctgcagccgcgcgccgtggtcgagcgcttcgtcgcggaaggcatgctggcgcacgtgccggtgccgatccggcgcgccatgtcgagctacggcattgtcacccgcaagaatgagctgccgtcggaggccatgctgcagttcatggcggcactacgggcggcggcccggtgagacggcacggggatcggagatagcaggcgggtcggatgcgctggcccggtgtagacgtgaatattgctccctggtattcgaaatgtccgtggccctcgaaagcggcaacggaccgtcatcagccagggcccatgcacgcaccaagttcgctcagcaggtgagcgaggctggcctggctgccggtctcggtcttgttgaagatcgccttgagctggctgcgggcagtctcgtggcggatgccgagccgcgcgcaggcttcgggcagcccgatgcccgcggtgagcacggtcgccagtcgaacctcggatgcggtgaggccatacagttcgcgtagcacgcccgccagcaggggctggggcggagcagcgccgacctcgcggactgcaaccagggcggcggggcgctgccatcggctggccaggcgatgggccggcggcagcggcagcacgatgacgcttgcgctgtgcccgctatcgtcacgggcatgcgcggcctgggccggcatggccgcttcagggctgcaggccgcagccagcatctcccggaacggccggctcaggcaccagtcgtcatggcacgcccgggctccgggctcaccctgcttgcccggcaacagccgcctcacccagtgttcgccacgggcattgctgagcagcaccttgccgtcgggcgcgacgacgatcaggccaaaggggagtcgttccagcacttgcgcagacagttcaccgagcatggtgacgtccagcgtgcgctcgcgcaggctcagtgcctgacgcaggtgcgggatggcccagcctagccggcgcgcgtcgtcagcgtggaacggttgttgtccgagcggcttttgcagcgacaaatagatttcgcggtgcggcttgcgctcgaccaggcagcccatgacggaactcagattgaacccgtgcatgaactcgctataaaagggcagccggctcatatttgccaggcccaggtcgcgcgaatcgatataccagtcacccaccgccatctggcgcgtgtatgtccgcgacgggtcctcggcctggtagtggtcgttgtaggcgtcgaccagttcctggttcagggcatggatctcgctgacccgcaaccgctggctgagcgcgtcgaactccaccagcgcggcgtgcatgctttcactggcatcgcgcagcagggccaggctggactgccaggcggcttcgtcaaggatgccctcgtacagacctcgtatggtctgatgcatcacttcttcttccatcgcgctcccccctgggcgcctgcgccgcgcacctgccgggggggttaccccgcgcggcctgattgcccgccttgctctgtatgacttgtcccccattcggggggatgcaaggacaatacgagatccgccacgcccgtacttgcggtttcttgcgaataattctggggagcaggcttgtgcgtcggctgtcaggtcaggcttgcctggcctgcacatgcgcattgcggcggaaatcgcttggcgatgccccgctgaacttgcggaaggcagcgaagaattgtgtgtaggaatcgaacccgcttgcggccgccacatcggacagggacatatcggggtggcgccgtatcagtttgcgcgcatactcgacgcggcaactcagcacgtattgccaaaggctgacctggcgcgtcttgcggaacatccggcacaggtggaaggggctgatatgaaccgctgcggcgatcgcgtcgatggtgagcggctgagacaggtgggcgaggatgaaatcgtccagccgcgccagcgtgtgcctggacaaaaggccccgttgccctgccagagcgcttgcgtcctgcctcccgccgccatagaggaggcccacgcgcaggctgatggccagcagcaaggattggttgagcaggctgccgcccacgctgccgccccggacatgggcgtccagcgccagcaccagttgcaccaggccattgtcggcgccgccggcgaagtccgagcgcagctcgggcgcgctgcgttcgtgcgtctgttcatgcgccaggacaacggcatcgggccgcacggaaaaatagatggcatccagcggggctgaccaggcgctggaaagcgcatcgcctgcggcgcgaaaatagacctggtttggcgccatcgccccgtccaggcgccgcccgttgacgtgccagcggatcgcgacgggatgccggccgatcgggacggccaggcagtgcacgggcatgaccgtggtgtccagggcgccggcgggcagcaggtggcgctccagtacaaagccgtcccagtgagaagtcgcgctgccatagcgcggcgtggtagggatcgctggcatggtgccgccggccgttgttgccagcaactgggtgcgtggaggagtctggcccatggttggcgcgggtcaacccgctcccaacatcgcgggcaaggcgagatatacggtatttttcatctttttgtaccgtcacctttcgctactgccttggcggcaggtcgtgcgctatgtgtggagcgagtatatacagcttgtggtcgttttagcggtttggtggcgttccagcaaactgccgcttccgaccctgagcagcctctcgactactgcagggggcggcttcggcagtcgagggggccgggccatgcagcaaattgccaacagtctgggcggcccggtttcgagttcaacccttcttttgccggatcaactgcatcagctcctcgcggtctgcttccagaatggaccggaccgacgttgagggccggcgcctggctcgatccatgaaggcttccggcaggaagtagtccgacagcgcgtccatgcgtttcggcccgaggcggttgcccaaccactcggccacatcgctatcgaagaacgggaagttcttcttcgaaggccgatgcacggcgatcgccctcaacttcgtggtgttgatgatgtctgatacgtcgccgtcgaagctgagcacctccgccacataaaagtccacgtgaggagcctggtcaggagtgacggaggtcaaggcatccagggcgcgaggaatgtacatgtcccaagcgcagtttctgatcagcgcgaggggatcggcatggttctggatggaattgagcttcctggagatccttgatcggttgctgcgcagcaggatgtcaccgcagacgatcagctcccgtagcatgattgtggacagttcttcgtgcatgtactcgaccaactgcgccagcttgtgctccttggccttgttggaactcagctcgatgatctggctccgaaccaggatcgcctccatcagatcgagctggtcctccaggccggcgaaaagcccagccttcaggttccgttcgaattccgccatcaggccggtggcaaaattctctgcactctcacggaactccgcgcggaagcgccgaccccattccgcagtcagcttgctgccggaggacgacagcgcatggatcgcggctactgactctttgcatctggcgaccgtctcatcgttccaggaccggagcgcctcccacagatacagataggggttgagctgttgcagccttggtccgatctggttgatcagatcagcccggttcaacgcttccggagacgggttgtcctggtaggcgatcttgcgaatataggtggccgcattggagtctacgaacatggccgagccgccgtgaaagcccattggcccggattgcgagacaaatggcgcgtccatcagccatagcgatttcccgcggaatacagacgtcgcaacgccggcggggcctagtgtccgatccagcagcttgatggatccggcgttgctctcctccgcaaagatgatctgccattcctccaaggcggccgcgttcttctcgaaccggcggtgggcttccagcgcattgggagccgaacagatttcctgcaccagttgctggtcggagagttgtcgggacggtgttggttcgggagatgcggacattggggaggtcgggaagaggtgactggcggtcatcagaaccgttccttgcacagagtcttcagcgtgcgcacaaaagtcgccatggtaggtgagtcacccgcaccctggcgccggtaaagcgccaccggcggcagcggccactccaggtcgcagggcacgctggccacgtgcgcgcgggtggacagatcgtgcgccacgtcggcaggcacgatggccaccatcgacgggttgcgctcgatcatgcggccgacgatcttgagcgaatgggtttcgatggccggcaccggtggctcttcgcccacgtgcaggaagaggtccagcaccgaggcacccagcgccgttcccgcgggcggcaggacccagtccatggtggcgagctcgtgccagtccagcgcgcgcttgcccagatgcctggcagtcttgaggtggcacaccagcgcagggcgctggcggaacaggatgtcgcagcgcaggtcacgcacctgtgccgcgccgcgcgcgcgtgccaccacgccttcgagcctgtgctcgcgaagcagcgccagcaggcggtcgctactggcttcctccaccgagaacacgaacggcccgacctgctcgcgcgtgtgcgagagcgtgtcgcacagcaactggccggacaggtagtggatcacgccgatgctgagccgctcggtgaagcccaggcgggctgcggccatgtcgttggcccagtcctgcaggtcgaccagcaggcgcgatgcgcgcgagatcgcgatgcaccccaccggcgtgggcgtgacgccaccgcgttgccgcgtgaacagagcagtgcccatcatggattcgacctcggccagcatctgcgtcaagtagggctgggtcaccccccattcctgcgccacgcgggaaagcgagccgtactcgctcagcgcgaccagcaggttgagctggcgcgccttcaggcgtgagcgcatgcggcccagcgtttcaagggccagggcggtgagtcggtcgggcataagtatttacttatcctggtatcaagatatctgccaatacgtttatgccagatcactacagtagtgtctagacatccgtcactcacacaccacaggagccccctagatgcctgtcatcgatgtccacacccacatcttcacaaagccctggctggagctgctcaagcgcaagggcggcctctacaacatccagcagcgccccgacggccagcacgaggtattccgtggcgacacgcccgtggtcatcccacagaaaggacacttcgactacgatctgcgcatccagcacatggacgcggccggcatcgatatctcagtcatgtcgctgacttgccccaatgtgttctggggcgacgaggaaaccagctgcgaagcggcgcgcgaatccaacgattcgctggcgcaggcgcaggccgatcacccgagccggctgcgttggttcacgtcgctgccgtgggaatacccgcagcgcgcgctcgacgagctcaagcgcacctgcgacaacggtgcgagcggcgtcatggtgctggccaacatcgccggccgcagcctgaccgacccggccttcgcacccatctgggccgaaatcgaccgccgcgcgctgccggtgctggtgcaccccaccgacccgccgggcgccgacctgatggacatgaccaagttcgacctgagctggtcggtgggcttcatgttcgacaccacgctcgccatcacgcgcatgatcttcgagggcttcttcgaccaataccccaacctcaagatcatcgcctcgcatgcgggcggtgcgttgccctacctggccggccgtttcgggaagggccacgaggtcgagatcccccagcggcgcaagatgcagcgcacgcccatcgactacctgcgccacatccactacgactgcatctcgtacagtccggcttcgctggagttcctgatctcggtcgtcggcgccgaccgggtgatgttcggcaccgactggccgcaccaggttcacgacacgcgcgggtccttcgccaataccgagcggctgcccgccgcgcagcgcgacgccgtgcgttcgggcaatgccatgcgagtattcggtttctgatcgacttcggctgaccaaggagactctcagcatgttgaagcgacgcgttttcaatcgggtggctgcaaccatggcgctggccgccgcgctgcccatgggcgcccttgcccaggacaagccccccctcaagctgctggtcggcttcgcgcccggcggctcggtcgatgtcgtggcgcggctgctggccgagcgcctgcgcctgccgctcggccagcaggtgatcgtcgagaacaagcccggagccggcggtcgcctggtgcttggggaagcaaagcgcgcgccggccgacggcaacacgctggtcatttcacccagcggcgcgttggtgatctcgccatggctataccacctcaactacgacccggtgaaggacttcacgcccatcgcgcgcgtggtgaccttcgacttcgcggtgacggcgggtccggcggcgccggccggcgacatccgcgcggtgctgaactggctcaaggccaacccggcccgcgccaactacggcacttcgggcgcaggcaccgtgccgcactttgcgggcgtgctgctgtcgcaggcctcaggcgtgccgctcacgcacgttgcctacaagggcggcgcgccggcagtgtccgatctgctgggcggacagattcccatcatggtggacacgatatcggagaccatcgagcatcaccgcgcgggccgcctgcgcatcctcgcggtcacgggtaacgcgcgatcgccggcgctgcccgacgtggccacgctcaaggagtccggaatcgacgccacagctgaggccttcgtcggcctgttcgccccggcaggcctgccggccgacaaggtcaagcgcctgtccgacgcgatcgccgaagtgctcaaggcgcccgatctccaggcgcgcatccgcgagatcggcctgaatgcgaactacgccggcccgcagcaacttggcgagacccaggtcgccgacctcaggcgctgggagcggcccatcaaggcatcgggctacaaggccgaatgatgttgccgccgtgcagcatgcaggggctggccgcgctcgtgggccggccggtcccgcacaggcgggtcaatcgtttccttcagtccgagtcgagccggcgactggaacgtaaagcgcaacagggctgaccgccaggtgattggcatatccaccgttatcagtgcgatgcatgatggcctgtcggccgacgcatgacctgaatttccggcccagtacggcattcgcaggaacttgctacattgctgactgctggcgaaaacagccccctgctgctgccgcgctcaccgcaaaccgacagaccaaggagacatcgaatgcacaccgcacttcaacttcgttcgcaaatcaagagcagcggtgaactcgagctgtcgctagacagcatcgacacgccgcaccctggtccggatgaagtgctcatccgcattgaagcctcccccctcaacccgtccgatctcggcctgctgttcggtgcggccgacatgagcacggccaaggccagcggcacggcagagcgccccatcgtcaccgcgcgcgttccggaaggcgcgatgcgcagcatggcgggccgcctggatgcgtccatgccggttggcaatgagggcgcgggcgtggtcgtcgatgcaggctcgtcccctgcggcgcaagccttgatgggcaagaccgtggctgccatcggcggcgcgatgtactcgcagtaccgctgcatttccgcggaccagtgcctggtcctgcccgaaggcgccacgcctgctgacggcgcgtcgtcattcgtcaacccactcaccgcactgggcatggtcgagaccatgcgcctcgaaggacatagcgccctggtgcacaccgccgcggcctccaacctgggccagatgctcaatcagatctgtctcaaggatggcatcaagttggtgaacatcgtgcgcaagcaagagcaggcggacctgctcaaggcacaaggcgcggtccacgtctgcaacgccgcgtcgcccacgttcatgcaggacctcaccgaagcactcgtcgccactggcgcaacgatcgcgttcgacgccacgggcggcggcaagctcggcggccagatcctcacctgcatggaagcggccttgaacaagacggcccgcgaatacagccgctatggctcgaccacccacaagcaggtctatctctacggcggcctggacacaagcccgaccgagttcaaccgcaacttcggcatggcgtggggcatgggcggctggctgctgttcccgtttctgcagaagatcgggcgcgagcgggccaacgcgctgaagcaacgcgtgatggcggagctgaagaccacctttgccagccactactcgaaagagatctcgctggccgaggtgctggacctggacgtgatcgccgtctacaacaagcgcgcgacgggggagaagtacctgatcaacccgaacaagggcctggccggataaatcaccgtggggcgccttgcgcgcccacccgtgtcaagaatcagccgctgcgccacagccggcggcgcggcgctgccggccggcaatgggagggcgctttccagttccgcggcggtgtggcagctcatccaggtgctgccctggcagtcatcgcgcaccagcacgcgcaggggcaagtccagcgcaacgctgggtgcggcgagcatcaatggcgttccccgcctggcgttgtcatagatcagcacctgcgtcgccggcattgccagcccggcgttgcgtgcaggctatgattttgcgggcgcgacggacgcgccctcgattccgtgacgcctgagagcgtccgaaacgaagcaggaggccttcatctgctcgacgaaccgccgtagccattccacggcttcagcgctgcgggctatggggaggcccatggcttgctgtatgaccataaaccggcccggcaacaacctcaggcccgcagtgcgcttggcatctgcttccaattgctgtcgcacccctgcagccacgtccgcgctttgctccaggaatgtttgcacaacggccggggacgtcggcgcgcgcacgatgtgtgcatgttgcagcgtacgagtgagataaagatcgtaggcgctcccttttcctaccacgacacggcgtccggcaagatcgacctcttcgttggccttgacggtggattcctccttcaccaaatacgcgccttcgatcagcacgtagggttcggagaatgcgatgccggccccccggaccgggtcgacggcaaagaatccgaagtccgcctgttcggccgtgacggcctcgaccgacttccccgctgagtcaaatacgacaagctcaagcggaacacccaggcaactggcaagctcacgggcgaggtccactgaaacgccgaatggattgccgccggcatcgaggtttgccaggatagggttgcctacgttgatggatgcgcgaaggattcccgtcggcgcaagctccgctgcgagccttgcatattgacttgtcatgatgcttccggcgtgtgccatttcagttcgtctttgcgttggcatgtcgatccagtagcgccttcaccgctggatccatggcaatgcccttttcgcgctgacgcgccagcttgtcgagttcgatctctccgggaacaatgacaggcttgccaggctccgcgggtgcgctaccgtggaggatcgccgcaaagtcttgcatgcgggcagccagccattgggccgatcccagtcgccgggtatcaaccaggataaagaaatggcccaggttctggggctggtcgggtgcatcgacccacgacttgacgtgagtcaggtacgccgcatccgacagcagtcctgcgaaaagatcgaccatcagtgccagtccatagcccttgtgcccgccaatcggaagcaggaagccatcgagggcagccttgggatcggtggtccgtcgtccttgcgcgtcggtagcccatgaatccgggatggattgtcctgccttgagcgcattgcgaatcttggcgcgtgcggccacgctcatggccatgtccagcaggaagtggcggccgtcatgccccggtacgccgaaacccagcgggctgttgcccaggcgtgcgtcgcttccaccccatggcgcgatggtcgtcgtggcgttgctgccaatcatgctggcgaatcctgcttccgccgcaatgtagctgtacggtgaaactggcccgaaatgattgctgccccggacgaaggccatgccgatgccgaattcttcggcgacttccatggcggcgcgcagcgccttcatgccagcgagcgggccgactgcgttgccaccatcgaccttcaccagcgctggcgcggcgcgctcgactgtaatggtggggcgtgccgagataccgccggactggagccgttcgccataggattcaatgcgagacagtccatgggtgctgagcccgaagaggtctgcaagtaccaggatgtcaatgacatcgatggcgtccccttcggtcaggcccaggccctggaacgcgcgcactccgagctggcggagttcggcttcggatacagtgattcgatcttgttgcatgctggatattctcggaagacttagtttgcctggattcccgcgctgcggatgacggtgccccagcgttgttgctcggcacgaatgaatgacgcaaattcggcgctgcccgcgccgacaggcgtgcttgcgtcctcggcaagtcgttgtcgcaccagcggggtggccagggccttgactgcctcggcatgcaggcggctgaccaccggcgttggcgtgcgcgctggcgccatcagcccaaaccattgcgagctttcaaatcccgggtagccttcctcggcaatggtgggaacgttgggaatcggcgcgaggcgctgtgacgatccaacggcgaggatgcgcagcttgcccgccttggcgtgttgcaggatccccgccaggcccgccgatgcggcgtcgatgtttccggcgagcaagtcggaaatctgggcgccggtgcccttgtatggcacgtgcacaagatcgatatgcgcagtctgcttgagcatctcgaaggcaacgttgccagcgcttccgttgcccgccgatccataggtcatggcaccaggcttcgtcttggcctgggcgatgaatgccttgatggaatcgctatggacggtaggccccaccgcgaacaccatcggcactttcgccagcaaagtcaccggcgtgaagtccttcagaggatcgtagggaagcttgcgcatcatggcgggattgacggcaagcgtgccaacgtggccgagaaccagtgtgtatccgtcaggcgctgcgcgtgcggtctcctgcatggcgatgacaccctggccgccgcccttgttgtccaccacgatctgttggcccagattcttcgacatctctgccgcgatgacgcgggcaatggcgtccgagcttccgccgggcccatacgggacaatcagccggatcggcctggcgggtgtccaggtctgcgcctgtgcgggaatcagtgcagtggctagcgggatcgcgagggcggctagggcgttacggcgcgacatgcgccgtaacggctcttgtactttgttgggcattgtgtctcctgcttggtcaggacagtgtttcgttccatccatagggcgaatgatcacgctgaccggattccagtgtaaagtgcaaagatcacaagtattcttgcgtaagacacatgaatttcgatttggcggacttgcgagcgttcctggccgtagccgatctgggcagcttcaaggcggcatccgatgcgatgttcctgtcgcagtcggcactgtcgcgtcgcgtcgataaactggaagaagcgcttggcgtcgcgctgttcacgcggaccacccggaaagtcgaattgactaccctgggccgcatgtttgtgcacaaggcgcgaaacgtcatcaacgagctggaagaggccatgctcggcatccagaccgttgccgatcggctgtcgggcgaggtgacgcttgcatgcgtaccgtctgcggtcgggcatttcctgccctctgtcgtggggccgtatcacgagcgctatccggggatacggatccgcatcattgacgagtcttccggggatgtccttctcgcggtcacgcgcggcgatgcggatttcggcctgacctatatcgggacgcaggagcctgacatcgatttctgccccttgattgaagaggcgttcgttgtcgcctgtcgcaaggggcatccgctggcgacgcgaagaagcgtcaaatggaaagaccttgaaggctttgactacattacgctcgcgcaaggcagcggcaaccgcttcctgatcgaccaggcccttgcgcggctgccggtaagaccgcgatggtactgcgaggtaaatcatgttcccgccttggtaagcctggtccaggccgacctgggaatcggtgttgtgcctcgaatggctttgccgccgaagtccagcagtggtctgcttgcgatcccgctgactgacccagtgataactcgaacgttgggattgatctcgcgacgaggacgcccgttggcgccggccgctcagtttctctttgacatgcttatccgaagaggaacagcgaaaccctaggcgcgtggcacgaagttactgccgtgtcagtgaccaccggtgtcagagcacccatggtcactcgggaaggaagcgatgatcgaccgagaatggccgacccaggctcgtccgggcgcagtttggccttgacgccatccacgttcaggcccccgacgtgatccatgtgcatatgcgtaatcacgatgtcggtgaccgcagccaggcctcgaccgtcgcacgtcttgtgcaaccatcgttgcaaccgattgtaggcagcgggggcgaacgccagtagcatcgcgaaggccctcagtatgttgaccgaacggcaacaattgctcctgcgtcagtacgagcgcatgcggaaatatcacgaacgcatccacgccatgcgtggcatgcggattcacagacgcgccgaatcacgcgtgattgacccgatcgcaccaggcgggccggaagccgggaagctgccggcccgcttcttatttcgacgctgggtaggcttcaggcggcccggtgaacctccgccgccaccccggccagcatgaggtcgaggttctgcactgccgcccccgaagcacccttgccgaggttgtcgaacaccgctgccaacagcacttgcccgtgctcgcagttggcgaacacgcccaggcgcaggtcgttggtgccgttcagtgcctgcgggtcgaggtgagtagcggcggccgattcggctagcggcatcacctcgacatggcgggcgttggcgtagtggtcgagcaggcaggcgtgcagcctgccgacgtccgtgccgggtgccagcaggtccaactccagcgccaccgtcagtacgataccttgccggaaggcgccgtaggccggcacgaaggcggggcgccgtgccaggcccgcgtgctgccggatttcaggcgtgtgcttgtgcgccaggtccaggccgtagacctggaagggcagggcccgggtggcctccggtccctcgtaggtatcgacggcgatgcggccgccacccgaataacccgacaccgcatggatggcgatggggtagtcgtgcggcagcaggccggcctccgccagggggcgcaacaggccgatcgccccggtgggatagcagcccggattgctgacgcgcagcgcgcccgcgatgcgctgcgcctggccggcggtcatctcgggaaagccgtaggtccagccgggctgcgtgcggtgtgccgaactggcgtcgatcacacgcaccgcagggttgacgatggacgccaccgcctcgcgtgcggcggagtccggcaggcacaggatggcgatgtcgcagccgttgatggcgtcggcgcgggcgcgcgcatccttgcgctggccggcgggcagtgtcagcaggcgcagatcgtcgcgtccgcgcaggcgctcgtggatctgaaggccggtggtgccctggtcgccgtcgatgaaaacaagagggtagcgcatgggatggatccttggcagtggcgtgaaagtggcggccccggccggttcagcatcagctctgcgttggtgcggccggtacaggaagcgccatcttgcgccaccggctagaatcgaagaagttgaatttcatgacgatgaaattcacgtttcctgaacgatattcctcgtcagcagatacgcccttaaccggagtgccgccccatgcgcgagatcagcctggaccgcctgcgtaccctcgtcgccatcgccgatctgggttccttcgccgaagccgcgcgcgcgttgcacctggctccgcccaccgtcagccttcacattgccgagctggaagcccgtgtcggtgcgcaactgctgacgcgcaggcgcggtgaggtgcgtccgtcgtccattggcgagaccctggtcgatcgcgcccgccgcctgctggccgatgccgaccttgcgctggacgacgtgcagcgtcaggtgcaggggttgaccggccgcgtgcgcctcggcgcctcgaccggggccatcgcccacctgctgccgcaggcgctggccatgctggcggagcggcatcccgacatcgacgtgcaggtggccgtgcttacctcggaggagacgctggcgcggctggccgccggcacgctggagatcggtctggtggcactgccacaggcgcgcgtggcggggctgaccatccgcccttggcggcgcgatccggtacgggctttcctgccagcgagctggccctgcccggcgcgcatcacgccggcctggctggcaacgcgcccgctgatcctcaatgacggcaccacgcgcctgtcgcgcctgaccgccgagtggttcgccagcggtggccacaggccggcgccgcggattcagctcaactacaacgacgccatcaagagcctggtggcggccggctatggcgcggccctgctgccacacgaggtcaccacgccggcgccggatgcgcgcatagtgatgcggccgctgcggccggcgttgtggcggcgactggggttggcgcacagcggggagcgggtagaacgcgccacggaatacgtacgggaggccctgtgggcgctgcgggcgggatagtgccgttggccacacgtcggccggcggctgtgcgcggcgccgccacgcgttgatcgtgtcctcgattgcattgatggagacatttgccgcgcctgtctgcatgttgcggtcatgggcccctcactggtgagcgccccaagctcagcgcccatggggctgctagcgacgggcggcataagcgccgtgcagtttcggactagaatcctctgaggaggtgtcagtcatgtcagctatcaagcgcatcgatccgggccattccgcccatcaggccgcgccgcacaggaccccccgctaccctgcggagcacgtcacgctgacggctggctccaggaagaggctacgccccagtgtgccgcatcgaaaggtcgggcgcggcaaggtcggcgtcggcggcaagtagggacctgcagcggctggtcggcttcgcgcccggcggctcggtcgatgggccggccggtcccgtacaggcactcgatcacttcttcacgatcgaagtacgcgccggcgcgtgacgttcagttcgttgccatagtctgtgtcggcatcagcgatcaccggtaccactaccgactgcgcgatgacgcgtgaacaagctgggcgtggggcagatcacgcacgatgtgtcgtcggcgccggagggtcagcgtcattcttgaactcgcgtgcaccctcatcgcacgccggcgcggagcagagtttgcagctacttgagcgctattgggttcgcaggcttgtgtttacagcgcgagcgtctaccgtgaaaggcgatcccacaggaaaggagacagcaatgaaaaagctagctttcctcgccgccctttcgctaacggccgttgcggcgtgggcgcagggcggtcgctacggttcgcctccaacaccggggactgacactggcaggcgcgcggagccaactgtgcaggccgccagcggagcttccggcgagagtgccaagaaagacaagagcgaagcgcacggcaaggttgaccgcagcaaggggcgtgccggcggccaaggcgcttccgccgcggcaacgcgtggccgtcctgcatcggcgcccgagagccagccctgagctggccaccgcgagttcttgttccccaatagggattgcacaacccttgactgggtgatcgcttgcgcctgcccgcgggcaggcgatgctaagtatcgtgcccggtcagatcgcggatgcgggggtagacgtcggtgcaccagcgaggcccgcagaacagatcatagtggccgcactggcgggccgtgaggtgccgcttgtcgcatgcggcgatgccttggcacagatcgtgcgcggcctgcgtctggccccggccggaaatctcatcctgttcgccctcgatggtcagcagtgcggtggtacggatgtcctgtggccgtactgcctcgccccgcacctgccagctgccgcgcgccaactgaaattcctggaacacgagctggatggtgtccaggtaaaactcggccgccatgtcgagcaccgcgtggtaggcatcgcaggcacgccggtgctccttggcacgcacggggtcgcagcgaacgagatccaggcaatagtcccaataagcctcccccagacgttctggctgtgccgccgccaagccggcaagttgcagaaagcttgggcacaccttgcgtccggcacccgggtagggctgcggtaccgcatagatcaggttacgctgaaaccacgcgagagagtggcgcgcggccagacgtccgagtgcagtcgggctgcggcgtgcatcgaccgggccgcccaccaggatgaggctcctgggcgtcggctcacccgcgctcgccaacagggaaaccgcagccagcgctggcacggtggcctgacagatggccagcacatgtagcggttccgccccgatccgacggataaaggcctgcaggtgggccacctggtcatcgaggtggaacggtccttcggccaccggcacgcgacgcgcatcgttccaatccgtcacatacacgacatgctcgggcagcaaggcctgcacgacttcacgcagcatgacggcatgatggcccgccagcggcgcacagaccagcaccggcggcgtcggtgcggtgcaagggtcaagcgcgcccatgtcgggtgcgaagcgcagcagccggcaaaacggcccttccacgatgacctgctcagccaccgcgatgacgtggccgtcgcgccggatggcggtgatgatgccaaacgacggcttctcgcaggtcctgccgagccggtagagcatctcatagccagcagcaaagcacgatgcgcccgggacatacgcgaaggggctggccggatcgatgaacgcatttgctgcgctcgccgcccatgcggtgaatggcgcgagcagcgcgcgctgatactcgacgagctggtacagcatgaagactcccgtaggaacgcgcacaagattccggctggcaatgacatccgcgctgtgttgctcacggcgatgggcatgctgccggggtcgatgtgcctctccatggcaacaggtgtcaccgcggggggggaacgtgcagtcataaacacgggccaggatttcactatatgtcggacaggccttgctgcaacgccaaacatcaagcgccgcgccgctggcggggcccgcttgcttgcgaccccgtaccggtcttccgcatcctgttacgtgaacggccggaattcgatggttcaccgccgatccgatagggcgtgaccagccatcccgccgccgccatcacactggacgcaacgcctcaagcatgatgtcagccaggcgctgcgatacctcggacgcgggtcccggcgcgcgcagcagcatcaggggcatcttgccgagcggcggcaatccttcggcagccccaagttgccgcagcgatgccggcaagccgtagggcgtgcggaccaccaacccaagtccggctgccgcggcggcccacaggccaccaaggttggggctggtgaacgagacgcgccaggggattccggcgcggtccaatgccgccgtggcggcatcgtggaaatggcagggccggtcgaacgccgccagcggtatcggctggccgggctcgatgtgccacggcagcgcagccggtccgacccagcacatcggcggttcgccgaccacggcgatatcggcgccgggctctcttgccgtccgagcgccatccgcgccgccccagaccagcgcgagatccagcgtccgcgcctggatgcgggcgaacaaatcgtgattgcgcgccaccatggcttcgacccggaccttcggatgcgctcgcgcaaaccgccccaacacctccggcagcattgcctcgccgaactcttcctgcagtcccaatcgcacgccgccggacaggtccacccctttcacggccgcggcagcttcgtcgttcagggcaacgattctgcgcgcgtagccaagcagcagactccccgcctcggtaagttccagggtccggccggccttgcgaaacagcggcgtgcctgccatgtcctcgagcttgtgaatctgcgcactgacggccgaagtggagcgcccgacctgctccgcagcgcgcgcgaagctgcccaggtcgatgccggcgatcaagctgcgcagcgcggcaatatcaagattcgacgtcatggcaatcgtgcggaaaaacgaaacaattggtcccaaactttctgattttcaagacgaatattggttgcaatactgacgccctgtcaacagccttatcggagggccgtcgtggccgagtccgtctgttttgcccgccctggtggcaattccctcgcggcttccgccgcttcgcatcgctggaaagtgttgggcgtcggcgttgccgcgaacgccagcttcatcgctgccgccaacgggttgcccgccaccgcggtgtggctgcgcagcgcctatcagatcgacaacggggggcttggcctgctgcttggtgcgttgggcatcggcgccgcgttgtccgaactgccgtggggcgcagcggccgaccggtggggcgaccgtcgcgtcctgctgtacgggctcggcgccaccgctctcatactggcggtgatggcactgttcctggccccaaggccggatcgcgtgccgtccttgccggtggcgatggcctgcatggcgctgctgggactggcgggcggcagcgtcaacggggccagcgggcgggcggtgatgcgatggttcgccgacggcgagcgcggcctggcgatgagtatccgccagacggcggtgcccctcggcggcgggctaggggcgctcgtgttgccgtggctggcctttgccatgggctttcgctgggtgtacgcagtcctggccgcgttctgccttgcctctgcctggctgacctggcgatggctgcacgaacccacgcatctcgctgcccccgcgtcggcacgacgccatgcgcatgacaatgccagcccgttgcgcagcctgcgggtctggcgcattgcgttggccatcggcatcctgtgcgcgccccagttcgcggtcttgagcttcgcctcggtgttcctgcacgatgcggcccatgtggctgtgtcgggcatcgccgccaccctttgcgctgtgcagctcggcgcgatggcgatgcggatctggagcggccgccataccgatcggcgtggcaaccgccgtgcatggctgcgccattgcacgctgatcgccgcgctgatgttcgtgccgctggccctctgcgcggcggtcgggcagggtgttcctgcgacgctgaccatggtcgcggtcgtgctggctggcatcgcggtttcggcctggcatggggttgcctacaccgaactggcgacgcaggcgggcgcggagcgggcgggtacggccctcggactggccaatacgctggtcttcgccgcgtacttcgctgcccctgcggcgattccgctactgctcgatagcggcggctgggccggcgtctggctcctggccggggcctgcgcggcgacggcgtggccgctttttccccgggctggcgatggtcccggcaactgactgacgtttccagtcactgcttcgaccggcgagcagcttcccattaataggcatgcgcagggttctgaaaaggagaaccactgcgacgggatttcggaactcgccatatcaatcacgaggcgctcaatggcgaccttcgcgctgaatcctgtaaagctcatgcctgggtcccaccatttcaggcgatgaccttctacactgcggcaggctgctcgcgcaggcgacgggcttcgtcgcgcaggaactgctggtaatcgtccagatcgccgtcgaagggctcgacgccgcccttggtgaccagccagaactcatcgcatacggcgcgcagcagggcccggtcgtgactgaccagcatcactgtgccttcgaattcgttgagcgccatgcctagcgcttcgcgggtggccaggtcgaggtggttggtaggctcgtcgagcagcagcaggttgggacgctgccacacgatcatgcacaacacgagccgcgccttctcgccgccgctcatcgtgctaaccgcctgatggaccatgtcgccactgaagttgaaggtgccgaggaaggtgcgaagggattgttcggtgccactctggccgggagcgcgcatgtgcgccggcgtgtccttggcaaggcggatcatgtgctccatcggcgtgtcgagcgggcgcagcacgtcgagttcctgctgtgcgaagtagccgatattcaggcctttgccttcgctgatttcgccggcaatcggtgccagcgcgtgcgccaccgtcttcaccagcgtggactttccttggccgttggcaccgagaatgccgatgcgctgcccggccagcacggaacggttgatgccccgcacgatgatcgtgggcggcgtgcccggcagtgcgccggtcggcgccgggtagccaaagctcgcgtccagcatcgacaacagcgggttcgggacgttgagcggctccttgaactcgaagttgaactctgcgtcggcaagtaccggtgcgatcttctccatgcgttcgagcgccttgacccggctctgcgcctgcttcgccttcgaggccttggccttgaaacggtcgatgaatttctgcaggtgggcgatcttgtccgcctgcctggccagcgcggcctgctgcaatacgagttgctcagcgcgcatgtcttcgaatttgctgtagttgccgccataacgcacgagcttggcgttgtcgacgtgcaccgtcacctgcgtcaccgcatcgaggaattcgcggtcgtggctgatcactaccagggttccctgatagcgcttgagccaggcttccagccagaccagcgcgtcgaggtcgaggtgattggtcggctcgtcgagcagcagcaggtcggacgggcacatgagcgcgcgcgccagttgcagtcgcatgcgccagccgccggagaaactgttgaccggctgactaagctgcgcagcactgaagccaaggccgaggatcagcgcttgggcacgcgcgggggcatcgtgtgcaccggcgtcgtgcagggccatgtaggcgtgcgccatgcgcatgccgtcgtcgctgacctcggcggcggctacttcggcctgcgcggccaacagcacggtatcaccctcgactacgaagtcggtcgcgctctgcccggtctccggcatctcctgcgcgacctggcccatcttccatgcagcgggaatcgagaactcaccgctgtcttcgtgtagcgtcccgttgagaaggccgaagaaggatgacttgccggcgccattgcggccgacaagaccaatcttttcgccggggttgaaggtgacggacgcgcggtcgagtacgacattgacgccgcggcgcagcgtgacattacggacggaaatcatagggagctacttcagagaggattcgcatgatagccgaccggatgtgcagggctgtagtctgatgcgttgacgtttgcgctcatggctgagatccatcctgtagcgggggcatgcccgcgggggagggtttcccccgcggaggggacgatcatgcgatcagcgcgttggcgacgatcgctgccgccgctacgctggacgtgctgatggccagccagcatcccagcaggaaggcgccgttggccacgcttcgacctggaatcatcttgtgtgctccgagggatggctggtggcggacatgcatcagcgctcgatgaccggtgcgtgcacgggagccagcgattcgtgcgtggttgccgtgcgttgcgcggctttgtggaccatcgtataggcatagtcgacccccatgccataggcgcccgagtgctccttgaccacggccatcacgtcgtcgtacgtctcgcggttcttccagtcgcgttgccattccagcatgacctgttgccaggtcacgggcaccacgcctgcctggaccatgcgctgcatggcgtagtcatgagcttccttggtcgtgccgcccgaagcgtcggccaccatatagatctcgtagtcgccctcaagcattgcgcacaacgcgaaggtagtgttgcagacctcggtccacaggccggccacgacgattttcttgcggccattggcggccagcgcgtcgcgcaccttctggtcgtcccaggagttcatcgaggtgcgttcgagcgtttgcttgccggggaagacgtcgagcagttcggggtaggtatagccggagaatgaatcgctctcgaccgtggtgatggtggtcggcacatcgaagatcttcgctgccttggccaggcccacgacgttgttcttcatggtctggcggtccatcgactgcacaccaaaagccatctggggctggtggtcgatgatgatcagttggctgttgcgcggggtcaggacttccagcttggcgttcgacatgctgctctctccgatgaaatttattcaatgatcttgagttctcgttgggcggcgctttgttcgctgtgttgcgttgtcgtgccgtccatgtgacgaactatagcggaggaaagtgcggaggcagtcagccagagttgtaagtattattcaaaaaatttgattaaatcgggacatgtacgaccctggctccggtgggcgtttggttcctgaagcccgcgagcgtggcgggctccgacatggaggagatcgaaaatgaccgccagcggcgcggcaccaggcgaaccaggcaagcccggtcgagttagcattcagtatctgattgatcttcgtccgccctccgactttctcccgacgctactcaggcgccatctgcgggtcgcgcggccccatggcgatgccgtaagattccgagggagccggacacaccggatcctggcgccaacgaagctcgaccttcccttcccgcgggccgccaccacgccgagcacctttctgacctagtccaatgtggaagtttcgacatgaccagactctttgccgcaagagcagcctgccttggcgagttggggaggcagggagagagcggcacgcccgcggcagggcctgccacgctctgatgctgcttctgcttgcgggactcagtgcctgtgggtcgctttctcacaatgctccgcgcaatctgcctcaggcagcggctggcagcgcatccgcgaccatgcgcgaacccaccgacgtcgttggcccgacaaccgtcgccatgtcgttctctggcggtggcacgcgagccgcagctttcgccttcggcgcgctgcaggggctcgacgccatgagaggtcccgggggcgcgtccctgctcgacgacgtctcatttatcagcagcgtgtccggaggctccatcaccgcggcgtactacggtctgcacggcaaggccagcctggcgacctttcgatcagtgctcttgaaggacggagaggcgggacttcgcttcagtctcctgaatccggtcaaccttgcgcgcctcttcgcgggaggcctcaacaatcgggaagatctccagacatggctcgacgaagacgtgttcaagggcgcgacgttcgccgacatgttccgccgcggcaagccgctcgtctggatcaacgccacgaacgtctactaccgggtcgcgttcccgttcagccagctggcattcgatgcgctatgcagtgatctcgcgagctttcccgtttccgaggccgtcgccgcatccatggcggtcccgctcttcttcgcaccgatcgtccttcaaaaatatcccgaggcttgcagtacaccgctgccgaaccttgaccacgcccagaggcccgggcaatcgctgctgcttggcgcgttggcaaccgccgttcgcggtcaccgggacacttcgaagggaaagtacatcaagctggtcgacggtggggtgaccgacaactacggcctggccacaattttgcaatcgcgcctgctgctgggcacggcttacggtcccatgagcgagaacgacgcgatcaatgtgcggcggctactcttcatcgttgttgacgccggtcagggcccgcgcggcgattggaaccaaagcccgggtggcccatccggaatcgaagtcgcaagcgcagccatcgacgcgggaatggcgaccagcgttcgaatgacctatgacgccttcgttcccatgatgcaacggtggcgcgatgatctcgtggcgtatcggtgtgcgctgccgcattcccggcagcaggagatcgctgcacgccgcccaggctggcggtgcaatgaagtcgaattcttcgtcacgcggatctcgtttgaggccctcgacaaggagcgagctgcaagcctgaacgatctgccgaccaggcttcgactgcccgagaaggacgtcgatcgcctgatcgaagcgggaagggatgtcatccttggcaacccggtgatccgcgagttcgagcgcgaatcgaccgaggcgcgatagtcccgcggcacgcggcgtgggtgaggccgcgttcttgctgctcggccgcggcgctctgacggtggcatgcgtccggcatggcgagaacgcccggtactccgttcacgccagccgccctccatgcaccggtgcaccgcccaccgacatgtcggcgcacaggatcgtcccggtggtcgactcggtcatgagtagcgtggcgccctcggtgccgccaaagcacagattggtcagcgatgtgccatccgggctacgaatcacctccacaggctcggcgcgatgattgagcacccagacatagccaagtccgggattggccaccagcagatggccatccgatctcattgccagaccgtcggggccgctcgggccgtaagaggtaaagaactgcccgaccttgctgaccgaaccgtcggcctgcaacggcacgcgccatacgctgttgccgcgggtcatcgcgacgaacagcaccttctcgtcaggcgacaggacgacaccgttcgggctcggtgcgttgtccagcaggacgtccagcttgccgtcgggcgtcagccgatagacgcggcccgtcggatcgtgcaagccggtctggccctggtcggtgaagtagaggttgccctgcgaatcgaaggtcaggtcgttgacgccccggaagcgttcggaattcctgcgctcgagaaacggggtgacggttcccgactttgcatccagacgcaccaggccgttgcgataatcagtgatcaggaagtcaccgctggccaggcgcttcatgccattcggttcaccgtcatactcggcaacaagctcccagtcgccctgcatcgaaacacggaaaatgcggccgtaggggatgtccgttacccagagttggccatcggcccagaccggcccctccaggaatgagtcgatcgtcgccccgccgcgattggcgtgtgcccacgcgttgtcagggtcgtgccgacggaacgactccggaagccgggtgagcacctgtgcatcgcgtacggccggttgctgaagtaggaacatcgccgctcctggttattgcttctcaatatgcgccttttgcgcaaccgttgcccattgcgcggtttcgcgctggatcagctgcgcgaacgcggggctgtccaggttgcccggctgcgaccccatctgcgcaaggaatgccttcatgtcgggcgcctggagcgccttctggatttccgtttgcaggcgcgtaatgacatcgttcggcgtgccctttggcgcggcaaggcctgaccagttgaacaggctgaagttgggtacaccagcttcagcgaacgtagggacgcccgggaacacatccaccctggtcttgccactgatgcccagcagacgcatctgattacccttgaccggcgccagcgcggtcggggtcgacacgaccagcagatccacgctaccggacagcagcccgaccatggcctcgccagcccccttgtacggcacatgcatcagcttgatacctgcggcctgttggaacgcctcggcagaaaaatgcggcgaactaccggggccgccggtgccaaacgtcacttctccgggatgcgccttggcatagctgatgagggaggccaggtccttgaagcgcgaatcggccttgacgccaagcaccaccggcgaaaatgcgaacggcgcgatagggatcagagctgtctgatggtcccagttcagtttcttgaagacataggggagggtggtataggagttgtcgttcgccagaagcgtgtagccatcggcgggtgcgttcacgaccagggacgtgccgatcgtgccggacgcgcccggtttgttctccacgacgaagctctgccctgtctgcacggagagcttctgcgcaaccttgcgcgtcacgacgtcgacggcgccgccgggaggattcggcacgatgatgcggaccggtttgtccgggtacgccgccacagcggacaggctgacaagcagcgtcgttgctgccaccaggcagccaatggttcgataaaacacctttgtctccttgtgctggggggaggcctgactgtccgtcggctcctcccgcgacacttctgttctagttgatgatgcagccgtgcgtcgttcaggccggcgtcgccacgccttgcagcaccgccaggacgttcttcgccgccccaacccccatgttcacgtacgccgcgttgctgacgccgccgatgtgcggcgacaggatgaggctgggaatgtcgcggaacggatgcggcacgggcatcggttccacggcaaagctgtccaggccagcggcatacagtttgccgctctgcagcgcttcggccagtgcaggctcgtcgatgagcccgcctcgcgccgtattgaccaggatcgcgccgtccttgaacgtcgccagtgtttcacggttcaacatgccacggttctcttccgtcaacgggcagtgcagcgacaccacgtccgattccctgaacaaccgaggcaggtcgacaagcgttacgccttccgggactgtcgtcgcataaggatcgaaagcggtgacatgcatgcccatcgccacaccaatcacggcggcgcggcggccgatctctccgagccccacaataccgagcgtgcaaccgttcagctcgacggccctataagttgccttgtcccaatgaccctggcgcatgcgatcgttgagatgtggaaccgctttggcgcacgcaaggatcagcgcccacgcatgttctgccacggcggcggcattggccccggctgcggcggccaccttgatgccgcgcgcctgcgcagcggatttatcgatggtgtcagttccggtgccgtgtttcgaaatcactttcaaggctggtgctgcgtccatgacttcagcggtcaagctgccgtagcgcacgataatgccgaccgggttgtgctcctttgccagggctgcaatatcggcggtctggggcgttttccccgcgaatacgatctcatagtcacccagcagcgcgagggcttccggcgcgaggtcggcacccgtgacgataatgacttgctttttcgtcacagtgcttctccctgcctcaggacgcccgccgtcaccagcgatgccagcagccagggcgcggtggtattgccttccctgatctgggcgatgcgcttggcttccgcctcttccttctttgccgccgcatcgagcaaggcttcgatcttctcgcgctccaccacgaccaggccatcggcatcgccgcagatgtagtcgccagggttcaccgtgacgccaccaacagaaatggggtgtccaatacgcccgccaacttccttggtggggccgttagggttcgtgcccaccgaaaagaccgggaactgcatttcgtccagctcgaggctgtcgcggaccgcgccgtcgatgacgacaccagcaaggccgcgctggcgagcggcatgcatcatgatcgttcccatcagcgcagaggtctggtcccctttgccgtcgacgaccagaacatcgcccggctgcgccagcgccagtgctgcgtggatcatcagattgtcaccggggcgtacctcgacagtgaaggcgggcccggcgactttcatggtcgggcgcaaggccctgatccggccatgcaacgcgccgcggcgtccgccgacatcggagaggatcgccggttggaacctggcagcgcgcgccacgatctcggcgggcacgcgctcaaacgatttgatgatgttgggcaaggtcatgatggactccagcaatatgaaatggataggtagataagggcgtcaatccagcttcgtgccggaggtcttgatgaccgatgcccagcgtccgatgtcctgcttgatcagcgcgctgaacgcctcaggcgtgccggccagcaccgatgcaccttgttcattcagcttcttggcgagctccggggatttgagcgccttgttgaactcggtattgaggcgtaccacgatgtccttcggtgtcgcggcaggcgcgacgaagccgaaccaggtcgcggtatcaaagccgggatagcccagttcggcgactgtcggcacctggggcaggtctggcaaacgcttcggcgacgtcaccgcgagcggccgcagcctgttgttcttgatatgcccgagcaacgttggcacggatgccatgtagagatcgacctggccgcccatcaggtcgttgaccgcctgggctgcgcccttgtacggcacatgggtgaacttcaccttcgcggtaccttgaagcagctcgccgccaaggtgcgccaccgtgccgttgcccggcgatgcgaaattgatcgctccgggctttgccttggcagcctgaatcgcgtccttcatcgtcttgtagggcgaggtgacatgcgtcaccaggacgagcggcgcggaggcgaccagactgatgggcgccagatccttcaatgggtcatacggcaaccgttcatacagcgagggattgattgcaaggttgctggtctgccccatgacgatggtgtagccatcggccggcgccttggctgccgcgtccaccccgaggttgccaccggaccctggcttgttctccaccacaaagacccagccggtcgacttggccaccgtattggtcacctcgcgcgcaatgatgtccgtgcccccgccggcgggaaaaggcacgatgacgcggatgggcttggtggggtattgcggcgcggcctgggtagtggcggacgccagaaccagacctgcggcgagcatgaatatgcagcgacgggaaattgccttcattacagtctccgaatctcggtttcgttgtgcttcggattgtggtcgaccgtttcacggcatacaatgctgtttcataccgtgcaccgcgtttcgttctatgaatgcgaatagtgatccaaggggcgcctcaaaaggcgacgatggcgctgggggcgtcatagcggtcacccgcgccctgcgcgtactcgaggcgttcggggtgaacgacccccagctctcacttgccgaactgagccggcggaccggcatccacaagaccaccgtgctgcggctggcgcgcacgctggcggcggacaactatctggtgcagaaggaagacggcaactggcggctcggccgcgcagccgggtggctgggcgcgtgctaccaggccaccttcaacgttcaggaagtggtggagccggtgctgcgggagctgacgatcaagaccggcgaaagcgcttcgttctacgtccgggagggacaacagcgaacctgcctcgtccgggtcgaaggaccgcaggccatccggcatcacgtcaggatcggggcggccctgccgctggacagcggttcgccaggccgcgtcatcctggcgttctcaggtgagccgggcgagctttatgaaatgatccgccgccgtggatttcatctgtcgctcggcgagcgcgaggccgaagtctcgagcgtgtcggcaccggttttcggattgcactggcggctgctaggctccatgtgcatttcgggaccgaccgcccggctaagcgaagagcgtttgctggagctggcacagacagtcgtcgacgcggcgaacaagctttcgtatgccatggcaggaagccaacggcctgcgatgcaaattgaaaggccgtcgacctggcacccttgagattgcagatgtggggcaaggagagccgatagaaatcttagatgacctctgtcagtcgcgagccgggcgtcggttttcgactgcggattcaaccggtcgattcagcgtctcggcaatgcaggtgccgaacgacgctatatggctgcggccgttgcgatgctccatcgttggcatttcaactggctcaagggtgcggaaatcctggatcggggaggaaggcgggatagggtccgataacgctgccttatcgtgtcgtcagcgaaatactagcgcgatggcacgccggggcatcgttgatccagaattgcagcggctgcgaaaagatgtagttgccgagccaaattgcgaatcggtatgtgccagacagcgtgaaagctgcagttgactggcagaacgcacccaccactttcgaacgttttatgcaaatcgtcgtttgctgaaagcagagctagacgtcgtcagcgggaaccgcatgaccttgatcccgcaaggccttcgtccagcgcttaatgcgtgcacgcagtcgtccctgtgcagccctgtctatcggcatgtcgtcgacgcggctgatcgctgtacgcggcaagacatagccaagctgtatcagggccatacagaagactcggtccttgtcgcgatccgctgccgccttcgccataaagaggtcaacaaggtcaaggcaatagccgacccgcccattcgtgcccaccgtctgaatgcgctgcaagcggttttcccagccggtcggaagacatgctgtctctggcccgacgccctgcgcgtagtaaccatacgtctcgtgaaagcgcgagccttcgccaatcgccgcgtcgatcgcatccgccttgtgggtagcattgagcgggtagatgtcagcctccgcggacatcgtgaaaaccgccgggggattagggatcggccccaggatggattggctgccaacgacaacgaactcatattcgttcgtgatgtcggcagcagcccgaatgatgtgttccagatcttcccgcttcattcctggtccccgaggacaacgccttttttcaacgcctgaacctgtgctagcacttcctgccgaatggcatctggtaaaagcgtgggcaggggagacgcttggcgcagctcttgagcacgccgagttcggccaagcgctttgcgccacgactggttcgcaagaatcgtttcccactcggaccagagtgaatcagaccgtgagtctccctgcgcgcgccatcgcctgaggacttctcgggcccggtccagtagcgctgggttatcctgaatcaggcggattgcttccttgtgcagcgccatgctctgcaagtcctgagcctcatggcggcttggatcagtccttacccgaacctgaacctgcggaatggcgcgcttggatgaggcggccgcagagttcgccggcgccggttgaaaagtatcgctgactaacagggcaaggtcaccggcaacccccagcacggacataacacgcagatatgtgcccatggttggcgcggggtcgcctgcctcaacggcagcgagggtcgtccgcgagatgccgacgcgcttggccatctcaaccgtgccaaagccctgagccttccgcaggcgtttgatgcggtcgccgagttgcaggagcaaatggcgctcgagaaccgaggtggtatcggtaaaggctggcatatgtccagtattttagacaaaattcacaggtttgactagtttactgaacagattttacgttgggcagcgtgttgcgtcggatccacctggacgtatctcagtcgaccgcagagttcctgcgccacacccctgttataggtgggcttgcagccgacgcgcgtctctctggcgccgccagtaggcagtgcctatggggccacgaataaacttgtgcaaaccaaccgtccgtttgcatgcaggcgatattggacacggcaactcttgcgcccgccggatagttggcggcaacacgatcgacacctcacagtggccgaccccggacgatggggcgcttgagggcaataggcgtgccctatcctttgcgaggaagctcgcagtggagctataccttagcggcgctacctggtggccatcaaagcggcgttcgccacactgaggcaatagcgttagcaagcatcaacgcccaacaagaaagccgggcggcggactaagttggctggctgacatgtgttcggtatttcgacgcggcgaatgatccgatagtgcggaccaggatgcaccatggcctagttgttggccccggtttcccggcgcatagcaaggtcgggtgccgtaccggaccagccggctctaacggacgaaaaatctgcggaccgcctcggccggaagcgtcatgccggtgaccttcgccttccgcaggatttcccagaaatagcggtaggtggcgcggtcatgcagttcgcccttgtactggatcggcccccaatccgcgtcctgcgccgccgacaggatgccggccgcgtcttcgacttcggcaaggtcgggacgcatggcgttcacgattggctggatctgcgccggatagatgctccacatgcgcagaaagccaaactcgtcgcgcgcgcgccgggcatcgctcgctatcacctcagcgtccttcagattcaggcagacgttgtgcgccggtacgataccgttggccagcgctgctgccaccatgtcggccttcgcacgccccagcagcgcatgttcgaactggcccggactacgcatggccgctgcgggaatagcgccgtggtggccgctgacgaaatccatcaggccgaagtccagtacctcgatgtggggcaattcggcgatctcgaagacgtcgcgcagcgcgccgtgggtctcgatgagcacgtgtaccggcacgggcttgtccaatccggtttttgtccggacctcgtcgatataccggatgacctccgcgacctgtccgctgccggtggccttgggcacggtgatgtaggccagccggctgccggcttctctcacgatgatgtccacgtcctggcgccaggcggggtgcgacgggtcatggatgcgtgcgccggcacggccgaagcggttgcgttccgacgcgatcatgcgcgccaccatttgcgcgtgctcgcgctcctgcccggcggcagcgccgtcttcgcagtcgcaggtcacgtcaaaggccgcgccgtactcgacctgcaggtccatggccttgccgatcagcttcccgctgccggcaaagtgctcgcacgcggccagcacgggaaaggccttttcgcctgcaaagagggcgtcgttcggatgcgttggggtgatcatgtgttgtcttgatggagggttggagtattcatcgttgggggatggcgatggtgtaatcgaggtcgagcaccacattggacgggtgcgcggcccgcccttcgcccggctcaggaaagacgatggacgaggcgcaggcgttcttcacgccgatcatgcgcagccgcagtgccccgatgtgctcgtgaccgaggtcgatcttgtccagcacccgggtggcgcaggcgatggtgtcgcccgcgtaggccgggttcacgtggctgccggcgttgatggcgaggatggacaggccgttctccagtccgtcataggccagcgcgcggcataccgagatgacgtggccgccatagaccagccgcttcccgccaccggcggccatggcatggccatcgaaatgggcgcgcgcggtgttctggtacaggcgcgtggcgatgctatggtcgctgtcattgatggtcatcgcgccggggtggtctatgcgttcgcccacggcgtagtcctcccacaggtcgtcgatgcaggtcatggcggtgatctcgcgcacgcgtgccgtgtagccgctcccgcgcaggtgttcgactgtcaccacgggctgggtggccggcacgaccggcgcgccgcatggcgcctcgggatcgcgcttgtgcaccattacccagcgcacccagccgagcacctcgcggccatactggttgcgagccgtggagcgcacgtaaaccaccccgctcctgcggttggaattctccttcaggccgatgacctccgattcgacggaaagcgtatcccctgaatacacgtgcgaaaggaagcgtacttccgcgtagccgaggttcgccacagcattgagcgagatatccggcaccgtcttgccaaaagcggtgttgaaagctagcaggtcttccagcggctggctttcaaagcccagttggtgtgcattggtctgcgccgtgcacagcgccgcgcggctgcctgtcaggccgatatacaggctgcggtcgccctcagtcagcgtacgcggcgtggcatgacggatccgcatccctatatggaagtcctcgaaaaaatttccgcggcgatttttattcatttccattccttgtggctcagtagcctccagcttcgaacgtgccctcgcggagacgccagtggttagcggatagcaccgaccgcgcgcagatcgtcgatgtcgtcgccgctgtagccggcggcgcgcaagacttcatcggtgtgctcgcccagcatcggggcacggcgccggaccgcccccggggtgtcgctcagcttgatcggcacgccggcgatcttcacgcgctgcgccgaaccgggctgctcgacatccaccagcatctgccgcaccgcataatgcggatcggcaaagatctcggcggacgtgcagaccggcccgaacggcaccttgccgcccaggacggccgcgatttgttccttggtgcggccggacgtgaagtcttcgagcaaatcgatgacttgctgcatgttggcgacgcgcgccgcattggtcgagaaagccggatcggtgcccagttccggatggccgatggcggcggccagcttctcccacagcggatcgttggcgacggcgatggacacgtagccgtcgcgcgcccggaacaggccgaacgggcacagcaggggatggcggttgccttccggcccgggtaccacgccggtgtaggaggtctggtagacgatgcgctcgcacatggccagcacggcgtccgtcatcgccacgtccacgaactggcccttgccggtttccttcacccggtgtacagccgacaggatgccgatgcagagcatcagcgccgggatggtgtcgcctacgccggggccaatcttcatcggtgtttggtggtcggggccggtgatgcccgtcatgccgcccatcgcctgtgcgactacgtcataggctggccagtccgcgtaggggctggcgcccgagcgcggatcgccgaagccccgcacggtgccatagacgaggcgcgggttgcgctcccgcagcctttcccagcccagcccgaggcgttccatcacgccggcgcggaagttctcgaccacgatatcggcgccgtcgatcagcttgcgggcaagcgccagcccctcgacggtcttcagatcgacggcaatcgaccgcttgttgcggttgacgctttggaaatagccgccatactcgcggagcgtgtcgtcctcgcagaagggggcggtcaggcgcgtgccgtcgcccgtcatggcctcgaccttgatgacgtcggcaccgtggtcggccaggatctgggtgcaaaacgggccggccagcatctgggtgaggtcgatcacacgcaggccggcgagggcgccgggggatgactgctgcatcatgccaccaccaccttgcccatcagcgcgtcggagatgatgcgcatctggatttccgaggtgccctcgaagatcttcgtcagccgtgcatcgcgccagtagcgctcggcggcgaaatgcgtagtgtatccggcgcccccgtggatctgcaggccttcgctggtaacgcgctcgcacatctcgctggcgaacagtttgaccattgacgcctcggtgtcggcacggcctccatcgtcgatcttctcgcacaccgaatagagcagggcgcgcgcggcctcgatctgcgtagccatgtcggcgatcttgaagcggatggcctggaagttgccgattggcgaaccgaactgggcgcggtccctggcgtactggatcgaatcttcgagcgcgccttgcgcgaggccgatggagcgcgcggccgtgtgggcgcgcgccgcttccagccctgccgtggcgaggtagaacgccttgccttcgtcgccaaccatcttcgaatgcggcacgcggcagccgtcgaacgccagttcccaggtggtccagccgtggtagccgatcttcggaatcacgctgcccttgacgccctcgggcaatgcgccgcgcggcttctcgaccatgaaggcggacaagcccttgtggcgcgctttcgggtcgatcacagcatccgtgcggcagatcacgaggatgaagtccgcctcgtcggcgaaggtgcaccagtacttgttgccggtgatgacccactcgtcgccgttgcgcacggcgcggcaggagatgttggcgacgtcggacccggcgttgggctcggacagcgaaaatgcgccgaggaactggccggccgccatgcgcggcaggtattcggccttcttctcgggcgtgagcgccttgagcgcgccgatcaggccgttgccgcgcgcgatcaggctgcccacgctcatccagccgcgcgacagctgctcggcgacgaggcagtactcgtaggcaccaaggccgaggccgccgtattcttcggggatcaggatgccgaaatagcccagctcggccatctcgtcgatcagttcgcgcggaatctggcccttctccgggtccagtttgttggccagtggcagcacccgttccatcgtgaactgacgggcggcttcctggatcatgcgccgttcggcggtgagcttctgcatcggaatgtctctcagcgaattcttctcgccggcccggcggcggccgggccggtgcccacgtcagggcaggacgttgcgcgggtcggccttcaggacgagttcccacgcctcgcgggccatcggctggctcttctcttccagcacatgtgccagcaggccggccgaacggcccaccaatgccaggccgcgcccgatcagcgggtccagtcccatcgcggcgatgatcgcgccgatggcgccgaccacgttcatcggcagcttgcggttgtgctcggtcatcagcactgccgaaatggcttccatcaggcgccagtgcaggccgtagtaaccgttctcgcgcgacaggtcgcgcagcgcgggcacacgcgggtcgccgtcgacgtggatggggtggcccacgccgaatacttgctggcggcgctccttgtggcggcggatcacatcgcgcgcggcctgcatgacatcggcgtcggtcgcatcgtcgcgcagctctttcgcgccttcgagcagcatctcggccgcgttctgcatcgggccgaggaacacgctgcccgcgccaagcaggccggtcgccaccgcgccctgcagcgcttcaggcgcgccgatgtacgtcaggcgggcggacagcgagctgggggtgatgccatggtcggccgtggtcaccagcagcgcgttgaccatgaccttctcgcgcggcgtgggcatgcgcgaaagcgtggtgaagaagatcatgtcgacgaagtcgaacttgccgatgatttcggtggacaaattcttgccgcgcaccatgatggtgtcggtcgtcgtatagccgatgtcggtctttaccattgggaaggctccgtgccacggaaggcgatgacagcgtccagcgccaccacgccctggccctgcggacgcaccgcgagggggttgatttcgagttcgtcgatgcggtcggcgtgcctggcgacaaagtcggacagcttcaccagcgtgtcggccagcgcatcgatgtcgaacggcgtctggccgcggtggcccttgagcagttcgtggcagcgcgtctcggcgatcatcgcgcgcgccgattgcggcgtgagcggcagcagtcgccggctgacgtccttgaacagttcgatcgcgacaccgcccaggccgaacgtgcagacatggccgaacacctcgtcgcggtggatgccgaccacggcttccacgaatggcgacggcagcatcggctcgaccagcacgccctcgatacggtccgccggcgcggccttgcaaccgttggcgtaaatttcctcgaacgctgcgcgcgcggcgtcttccgacgcgatgcccaggcgcacgccaccgatgtcggtcttgtgcgtgatggccgcgctgacgatcttcatcaccaccttgccggtgccttgcgcagctgcattgcggaaggcctgcgccgcttcgtcggccgaggtggcaaccacgccgcccggtacggtcacgccggcgcttgcgagcagcgccttgccggcggcttccgacagggccgcacaggcgcctgcagccttgcgcggtgcggtctcgccgagcgcacgccagctgtggtcgaactgcgcctgccatttgccgtactcgatgaaccgcttcacggccagcaccgcgttgccgaccgcgcgcatgggcatcaggccgccctcgatcatcttgcgctggccttcgccggtgcggtcgctcatccagacggggacgatcggcgtggcttcctctgactgcacgcgcaccatgctgtcggccagcatggcgctggtcttgccgtactcgacgggaatcgggaccagcacgaggtcggtattcgggtcgcccgccgtggccttgagcgcggcgtagccgacctcggcattgaccagcacctcggcggtcacgtccaccgggttgtcgaacgcggcgtagccgggcagggcgcgggccagcgcttcgagcgtctgcggcgcgaacttcgacagcgtcagtccggcgatgccgaccatgtcggtgcacagcgccgccgtgccgccggagaagctgtagacggcgagctgttccttgcccgtcggcgtggcgcgcgacagcagcgaggccacgtcgatcagttcatcgatgtcgtccacttcgatgatgccgagctggcggaataccgcactgttgatctcggccacgccggcgatggcggcggtgtgcgaggcggcggccttggcgccgatttccgacttgccgaccttcagcgcgacgatgggcttgccccgtcgcgcggagtgcagcgcggcggccatgaagcgcgggccgttgcgcacgccttccagcgtggtgacgatgaccttgatgtcgggcgcatcggccatgtagtggatgtagtcgctgacctcgaggtcggcctcgttgccgcccgagcaccacaggccgatgccgacgccgcggtccatcgactggatgaacgagcggcccagcccgccgccctgcgtggccacgccgatggggcccggcctggcattgtcgatgcgccaggccggcgagaacgtcatgccgaggcgcgcgttcatattgttcaggccggggcagttcgggccatagatgcgcatgccggtcttcgcgacgatggcgcgcatctcggcctcggcggcgcggccttcctcgccggtctcgccgaagccggaagtgaagacgatggcgaacttcacgccgcactcgccgcattcgcgcagcgcgtcgagcaccatgtcagcgcgcacggccacgatggccaggtcgggcacggcgtcaaggtcgcgcaccgaggggtagcacgggcggccagagatttccttgcggcccggattgacgaggtacagttcgccctggaattgcgagtagaccgtcaggttctcgaaggtgcgggcgccgatgctgtcgggcttctcggaagcgcccaccagcacgatcgagcgcggctcgaccaggcgggtgaggtcgctgaaccagaggccgttggcttccggtgttgtcgtcattgcgcttctccgggcgtgcggcgcttgaacaggcaggtggcggccatctcggccacgacttcgccgcgctggttcacggccttgcgcaggaaactgatgacaccgcgctccggacggctggtcggcttctgttcggtgacttcgatgtccacgcggatggtgtcgccgatgaaggtcggcttggggaacttcaggcggttttccagcacgctgaacagcgagccctcgaagaactggttcgggatcgagcgcgaggtcaggccggccatgaacgcggcgaccagcatgccgtgggcgatgcgctggccgaagatggtgcccttggcgtactcggcatcgacgtggactttgttgaagtcgccggtcagggcggcgaaggctgccacgtcggcctcggtgatggtacgcgacgaggtgctgtaggtcatgcccggggtcaggtcttcccagtagagcgtggtgttggcgacctggtcgaggatggcgggttgggtcatggtggatgtctccgggtatcttgtggttcaggtcagggcgctcacgcccaggatctcgcggccgatgatcagcgtctggatctcggtcgtgccttcgggaatcattccgccgcgcgtgtcgcggaagatgcgctcgatcgggtagtcggtcgcgtagccgatgccgccatgcacctgcaggccgaggttggccacctcgaatgccgcctcggtcgcgtacagcttggcgatcgagcattccgtgcgcgcggtgccgttctgcatcgcacgcgcggcgcggtagccgagcgagcgcgcggcctgcacgcgcatcgtcatgtcgacgatatgcttctgcacgagctggaacgagccgatctggcggccgaactgcttgcgctgcagcgcgtagtcgatgctgaggtcaagcgcgcactgcgccgcgcccaccgcgcccatcgccacattgaggcggccgaagttcaggccgatcaggatctggcgcaggccctggccttccgtgccgatcaggttggccgcggggacctcggcgttctcgaacgtgaaagcggcggtgccagtactgcgcgtgaacaccacgtcgaccggtgtggcgtcgtacttcgtcacatcgcgctcgaccaggaacagcgacagctcgccgttgcaggtctcgctgtaggtgcgggccaccacgatgccgaagtcggcgaacatgccgttggtgatccacagcttgctgccgttgagcacgtaggtgtcgccgcgcttgtcggcgcgggtcttgacctcggccacgttggagcccacgtccggttcggagatcgacacgaagggcttgcgctcgttgcgcagcagcgggcgcacgaagcgcgccttctggtcctcggtgccgtaggcgttgatgatgccggagacgatgttcaggccgttgagcaggatgcgcagcgacagccagcagtagccggcttcttccatcatcaccgcccaggtcgggtagtccaggcccatgccgccgtcggcttcgggcaggatgccgccgaaatagccgaagtcgatcaggccggtcatggcctcgtgcgggaactgcttgtcgcgctcggcctgcgggatgcgcggcgcgatatgttccttcaggtagcggcggatattgtcgcgcagcagttgctggctggcatccaggccatcgacgtcgacactcgcttgatcagccatagcggcctccggtcacgaaaagggtggtacccgtgatgtagcgcgcgtgttcggacgccatgaagcacaccgcgccggctatgtcgccggtctgccccgggaaggagaccgcgttcttcgccattacgttggcgaggatggtttcgtagttgggcaggctcttgatgtactcggtctcgatatagcccggggcgatcgcattgaccgtcacgcccttgcgcgcctgctccagcgacagcgcgcgcgtcaggccgatgatcccggccttggcggtcgagtagttggcctggccggggttgccgaacagggcgcgcgagctgatgttgatgatgcggccccagccgcgctcgtgcatcgcgggcagcacggcgcggcagcagtggaacgcgcccttcagcgtgacgtcgagcacgaggtcccagtcagactcgtccatcttcaggatggtgcggtccttgaccaggccggcgttgttcaccagcacgtcgatgcggccgtaggcctccagcgcggcgccggcgagctgcttgacctgttctaccttgcgcacgtcgcaggccacggcgatggccttgccgccggcggactcgatggcgcgggcgttttcggcggctgcgtcaaggtcgagatcggtcacgacgaccgatgcgccttcctttgccagcatgcgtgcggtctcggcgccgatgccgcgcgccgagccggtgatgatcgccacacgatcgttcaatccaagatccatgtctcctccagttgccaggggttgctcagtggtcggcctgcagcgcctggctgacttcgcgcagggccgacagataggtttcgcgatgcttttcgatgcggtcgacggggccggccagcgacaggccgaccggctggccgccgagccgcagcgatacggccagcgcggtgacgccgggggtgccttcgtcatgggcttcgtaccagcccagttcgcggccgcggcgcagctgctccagcagccggtccacgtccaccacggtgtgcggggtgacggcgggacggcgaatcgcgttcagacgcaagcgggcctcgtcctcgggcagcatgcccagcatcgccttgcccagccccgaggcgtgcagcgccacgcgctgacccacgtcgaggatgtagcgcagcggcagccggcttgcggcggcggcggccaccttgacggcagtcggctccagcacgccgaagaaggcgctttcattggtgcgctcggcgagctgctcgacggcttcctgcgccacgcgggtcagcggatcgctttcggcaatgcggcgcgcggtctccagcaggcggccggtcgggtagaagcgccgcgtgcgcgaggtgcgcatcaggtagccgagggaatgcagcgtgtgcagcaggtcggaacagctgctgtccgccacggaaagcaggcgcgccacgtcggagttcgacaggtcgcgctgttcgcgggcgaagacttcgaatacggccatggtgcggctcgcggcaggaatcaaggtgggcaatttaggctccgccgatctgagttgtgtacggagtgtgggattaatgtacgacagatcgtatatgggatgtcaagataattcgaggattcggtatttcgtacgaaatgtcgtatttatccggaatcccgcgtcccggctgcgtctccggctatctctcggttcatctaggggttttcctatatatggaagatatatccggtatgccgtagaataaatttcgatgaacgggagcaatctacgagatgtcgaaaatgctggtgccgggaaactgcggttgcggtccccgcccacgctgccgcaaggagacgagggaatgaccagaagggctatcaggaaccggtttgccgggatggcaagaacgatgggcgccgcgatcgtggccggggcgctgattgccctgatgccgttggcgccggcacgggcagcgactggtgagggctatcccgccaagccggtgaccctggtcgtgccggggccgcccggtggcattacggaccagctcgcgcgcctcgtcgcggcccgcatggggcgcgatttcggcgtgcaggtcgtggtggacaaccggcccggggccggcggcaatattgcggcggagcttggcgcgcgcgcgcagccggacggctacaccgtgctgatgggcacgcagggcatgatggtgagcaaccagttcctctacaagtcgctgcgcttcgatccgtcgaaggacttcgttcccgcccagggacttgcgtccatccccaacgtgctggtggtgagcagccggctgccgttccgttccgtcagggagctggtggactacgcccgggcgaatcccggcaagctgacggtcgcgtccgccggcaacgggaccggcacccatctggtggccgaactgttccagaccgaggccggcatccggctcgtccacatcccctacaagggcagcgcgccggtcatcaccgacctgctggcgggacaggtcgacctggccttcgactaccccgtctcgacgcttgcgcagatcgaagccggcaagctgcgtgcgctggcggtgaccggcgcggcgcgcctgcccgcgctgccgcaggtgccgaccaccgcggagtcgggtttcccgggcgtcgaatcgacgtcgtggatcggcctgttctttccggcccggaccagcccggccatcgtggcgaagtggcaggccgacatcggccgcctgctggccgatcccgcggtcattgccgagatccgcaagatgggcggcgtcccgctcgcgctcggcggcgcgcggctcggcagcttcgtggagtcggagcgcggcaagtggaaggcggtcatccagcgttccggcgcgagcatcgactgaataccgccccatgccggctcgccgagcgcggatcgcggcggcggcaggcgcggggcatttcaacacctacccaacatcgaccaagagcagacatgaagacacgtcttactgaattactgggcatccgatacccgatcgtgaagggcggcatgcaatggatcggccgcgccccgctggccgcggccgtgtcgaacgccggcgcactcggcatggtcacggcgcgcacgcagcccgatccggacgagctgaggcgcgagatcgaccgcacgcgcgcactcaccgaccagccgttcggcgtgaacctcacgctgtcgttcgcggcacagggcgtggtctacgacgactgggtcgccgcgatcgtcgccagcggcgtgaagatcgtcgagaccgcgggcaacaacccgcgccccgtgatcgaggccttcaagtcggcgggcatcaccgtcatccacaagtgcacctcggtgcgccacgcgcgggcggccgagcgcctgggcgtggacgtgatctccatcgacagcttcgaggcggccggacatatcggcgacggcgacgtgggcagcatggtgatgattccggccacggtgcaggccgtgaacatcccggtgatcgcctccggcggcatctgggggggccgcgccatggccgccgcgctcgcgctgggtgccgaaggcgtgaacgtcggcacgcggttcacgctgacccaggaatgcgagatccacgagaacgtcaagcagatgctgctccagggcaccgaactcgacacgagcctgatcaagcggacgctcggccataccgcgcgctacttccgcaacccggtggccgatgaagtccgctcgatggagtatcggcccggcggcgctacctacgaggatcttgcccatctgctggccggtccgcgcggccgcaaggcactggagtccggcgatgtgcatgcgggcctggtctgcgccagccaggccgttgcgctgatcgacgacattccgacctgcgacgaactggtgtcgcgcatggtggccgagtgccgcagcgcgttgcaggcatcgctcaaccgctttgacgcctgaggaggatcacgagatgcaggaagacatcatcacgctgcgcgaagcgcgcctggaaatccgcgacggcatcgccgagttcacgcatacccaggccaaacggcgcaatccgctctcgctcgaactgcgcgaggactacaccgacatgctggatcgcgtggagggcaaccccgacgtgcgcgcgctgatcatcaccggcgagggcggggtattcagcgccggcggcgacctgcggggcatgaaggcgcgtatcgacaacccggatgctgcgcagcacacgcccgacgccacgcgccgccgcgtgctcgtgctgcacgactgggtcagccggctgcgcagcctggagatacccgtcatcgccgccgtggacggtcccgcggtgggcgcgggcatggggctggccctgattgccgactttgtgctggcgtcgtcgcgcgcattcttcggcatgtcgttcgccaaggtaggcatgatccccgatatggccgccgcctatttcctgccgcgcgtggtcggcatggccgccgccaaggacctgatgatgacggcgcgccgcgtcagcgccgaggaagccaaagacctcggcatcgtgtattccatcttcccgcacgagacgcttgcggagcaggcacgccggtttgcccggcgcttcgtcgacggcccgcccgaggcgctcggcatgaccaagcgcatgctcaacagcgctttcgagacgacctacgccacgttcgtcgagctcgaagccgccgcgcaggccgtggtcaccaccacgccgttccaccgggaggccgtgcaacgcttcgtcgatggccagcccgggcgttatgactgggatcgccaggcgtgagccaccggcataggtccgtttagagacgagccgtcaagaaggggggaaagcaaagccgcagccgaaaacggctgcggctttcgcattacaccagctgcatgatttcgtcagcgggcgcgcggatcgtgcggaagctgttggcggggtgatcgtggtcggcaaagccgaacgcgattgcgcagaccatcttccggtcctcgccgatgccgaagtgggaacgcacgaacctggcgtgccgggcgaccgctccctgggcggtcgtcgccacgccatgcgcatgggcggcaagcaggaacgacgcaatgaaaccgccgcagtccatcgccgcgtagtgcccgaggtctgcgggcatcgtgacgatcgcaacgtgcggtgccccgaacagcctgaagttctcgaacatctggctgtcgcggcgctcgtggtcgtggcgctcgatgccgagcgcctggtagagccgatgacccgtctcccgcctgcgttccgcgtggacgccgagataggcctcgggaaacggcaggtcggcgtcgccctgcggaactttcctggcctgcgccatcagcgcgctgcggaacttctcggtcgtatcggacgtgccgatgaccacgtgccagggctgcgtgttgcaccacgatgcgctcttcctggcgagcccgacgatactgcggatctcgtcgtccggcaccggtgtcctccggtacgcccggcaggtgaagcggtcggacatcaacctgcgcaggacatcgatgtcgccggcgcattgttcgcggggcgggtgctgtggcattgcctgtctcctttgatctgatgatgcgacacgccgcccgggatcaaatcactgcggcctggcgaagttcctgctgcgcggcatcgctcaggcccagccattctccgaagatctcggcattgtgctcggccagttgcggcgcggactggatcggctgcgcgggagtggccgacagccttggccccacaccgggcatcttcaggctcccgatgcgcgggttctccacgctctgaatgcttgcgcgcgcggcatagtgtgggtccgcgaagatgtcctcgatggtgtaggtcagcgtgtacgcaagtcccgcctcctgcaacgcggcctcgatgcccgccacttccatgctcctgacccacctggcgacagtggcgttcagttcgccgatgtgctcccagcgctgactgtgggtggcgtagcggggctcgcgggccaggcccggctgccccatcgcgctgcacagccgtgcgaacatggcgtcagtggccagcgtgagcacgaggtatcggccatcggaggtctcgaagatatcgcccggcgccccggcggcggaaagattgccttgccgttgccggatggcaccgagccggtcatacgcgggaaccagagtgtcggtgaaacggaatacggattcatacaggccaaggtcgatatgctgcccgatgccccctttcgcgtcgcgatgatatagcgccatcatcacggcgtaggcaccgaacagtgcggcctgataatccgccatcgtgattcccggtctcacgggcggccgatccggatagccagtcaggtgcaggatgccgctgaacgccagtgcaatgcgatcgaaggcggcgcgctgcgcgtatggaccggtctgcccgaagcccgacacgctcagcatgaccagccctggattgacggtggccagcgtgtcgtaggcaagtccccatgcagtcagcgtgccgggacggaagttctccacgacgacgtcgaccttcgcagccagcctgcgcgccagcgcctgcccctgcggcttgcgcaggtccagcgtaatcgacttcttgttgcgcccctcgacgttccagtacaggctctcgtcctcgatgaacgggccgatctgccggagcggatcgccgccgcctggctgctcgaccttgatcacttccgcgccaaagtcggccagcagcgtgcacgccaccggcccggcgatcatggttcccagatccagtaccttgaggttcgcgagcggtccgcgtccctggctggcgcttgtcttgctggctcccggctcattcatttggtgttttcctcacgatcgaccatgggacagatggtgtgcttgcgaccggacttcacggtcaggcggtcactcttcacgggcgccggatagcttgatcaggcgcccgatcacgggcagtgcggcctcgaagttctggcggaactcggccgagctgttacccatcggctcgaagccgtaggcctggaagcgtgccttcaacggggtcgagcggatgatctcgcgcgaggttttctccaggaacgcctgcacgttcggcggtatgcccgccggcgccatcagcacgatccaggcatgcgagcggaactccgggtcgctgaaccccgcttccgccatggtcggcacgtccggcatcgccggcagccgcgtatcgccgaccacggcaagcgggcggatcttgccgctggccacatacggcgccagcgcaccggccgaggcgatggtgagttgcaccgagccacctgccagtccctgcagatcctgcatctcgctgggatagggaatgtgcgacatctccaggccgcgggaactgttgagatggccgatgacgagatgcgcattgctgcccacgccgtacgagccatagttcaccttgtcccggttgttcttcgcccaggccacgaattcctgcaggttgcgcgccggcacggcggcattgacggcaagcaccagcgtcccggcgctgacctgcgtaatgaaggcgaagtcgcggcgcacctcatagggcacctttttcatggtcagcgggacattgaagatcgccgtggattgcgccatcagcagcgtatagccgtcgggcgcggcccgcgccgccgccagcgtgccgagcgcgcccgaggcacccggcttgttgaccacgacgacgggctggcccgtgcgccgggtgaactcatcgccataggcccgtccgatggtgtcgaccagtccccctggtgcgctcggcaggatgagcgtaaccggcttgccggggtaggcctgcgccatcacggcggcactccaggcgagtgccaggatcggcagcagcgccttcttctgcttcatcaacatatttgtcttctcctcacacgtactgcggggagccagatccggcccgaaagcttgtcgagatgtcgctacgccatggttgccgccatccggcgccatcgatactccctgacgcaggggggatcggagcggggcttaagtccataagcctgcctttacgccagcactgcctgcaggccagaggcgtctgaccgcgatggcagtcggcgccgttagcgtccgccgtggccgatggatttcacatgaaacggcgcttttggcgatgcgcggaaccgttgcggcggcacggcgacagccgatgcacgcccccgacggcataagcgctgctcttgccccctgcggcgggtagtaggaatgatcggcagcgggggtgaccatggacgcatcgggcaatcccgaagcggacggctgcatggcccgggccgcaatatcccgaagaggaggagacacatgctcatcaggtgcaaaagggcgctgctacccgtgatggcaatcatctggggtaccggcagccttgcgcaaacctaccccgacaagcctgtcacgctgatcgtgccggccagcgcaggcggggtggtcgacgctctggcccgtgcctatggcgacgagttcaggaagctcacggggcagcccatggtggtcgtcaacaagccgggtgcctcggccatggtggggacgcagatggccgcgcgctcggcccccgatggctacacactgttgatgacgcaagccacgtccatcctgaacgggccgctgatgaccaaaaagatgccgtacgacgcgcggcgcgacctggcattcatcacgcaggtgggtaccgggaacctcgtcgtggccgtaggcaaggacgtccccgcccgcaacatgcaggagttcatcgcctgggccaaggccaaccgtggccaggtcaactatggttcgtacggcgtcggcggcaccgcgcatctggtctccgcctacctgagcagttcccgcaacctggagatgtcgcacgtcccctatccgggcgaagcgccggagatccaggggcttgccggcggcgcagtgcaatgcgccattgcttcggccggcgcgctggcgccccatctggcaagcggcagggtgcgcgcgctggccgtgattgcggacaagcgcctggcagccctgccggacgtgccgaccatggccgaagcgggtctgcgcgatccggagttccgtccgcagtcatggatcgtgctgatggcaccggcgggcacgccgcagaacgtgctggcgttcgtcgaaaagacctcgcgcgacatcatccattcgacgccgatgaaggcgcgcttccaggcctacggcatcgagccggtcggcaacagttcggccgagttccgccataacttcgaagcactcatgcctgtcatggagcgcctgatcaaggtatccggcgccgcgggggaatgagcgcggcctggcggtctggtcccgttttcatgtgaagtccgtttgtcgaggagagtatgtcgcaacgagaatttccatcaggcatccggtccctggatgccgtgttccgcccgagatccatcgccgtggttggcgcgtcggatgatccgacgcgcatcaatggacgcccgatcgccttcgccaggcgcttcggctacgaaggcgccatctatcccatcaatccgtcgcgtcagaccgtgcagggcctgcgggcgtatccgagcctgcgcgacgcgcccgacggtatcgactgcgcgatcatcgcgctgccggccgcgctcgtgatcgacgccctgcaccagtgcgctggcaagggcatccgtgccgtggtgctcttcaccagcggcttcgccgaactcggggaagcgggccagcgcaagcaggaggagatcacgcggatcgccagggcccacggcatccggctgctcggccccaatgtgatcggctgcttctgcctcagccgcaagacctacgtgacctttctcagcgatgtggacggcgcactgccggccggcaagccgcgtatcggactggtcagccagagcggcggctatggcgcgcatatctacaagctggcgctgcagcgcggcctcgccgtcgaccaggtggtgaccaccggcaacgaggccgacatcgaactgggcgaggtgatggagtggatggcggagtcgcccgatgtcgacatcatcgtcggctatatcgagggcatccgctcgaaggcgtcgttcattcgcggcctggaggctgcgcatcgcaagcgcaagcccgtggtgctgatgaaggtgggcgccacgcaggcgggcgcagcggcggccgcatcgcacacggccgcgcttgccggcgccgatgccgtgtacgacgccttgctgcgcgagtatggcgcctaccgcgccaggtcgaacgaggaagtgctggacgtcgtgtacgcgctgagcgccggcaagcccctgcgcaagcgcaagctgggcgtggtcaccatctccggtggcgccggcgtgcagattgccgatttcgcatcggaagcggggctggacctgccgatgccatcggaagccacgcaacgcgcactgcgcgagatcgcaccgttcggctcgcccgccaatccggtcgatgtgacggcacagatctccaacgaccccgagatcttcacggcgacgctggaccggctgctcgacgccggctatgactcgctcctgatgtggctcggcccggccgtgaccaatgcgcgcgccggtgctccgattcgggcaaccatcgaacgcattgccgccacgcgcccggatgtgctgcagaccatcaacctgatcggcggggccgaggtgacaagcgtctacgaagccgccggctgcctgctgttcgaggaaccgcgccgcgcggtccaggcgctggccgcactgcggtatttcgagcgcgtgttctcgcggccgctgccggtccggcccgacgtgtcgcagatgacgctgctggcgccggataccacgtacaacgaggtggatgccaagcgggtgctggcgggcgccggggtggccctgctcgacgagcggctggtgcataccccggcgcaagccgccgaggctgcgcgcgagatcggccggccggtagcggtcaaggtcgtgtcggccgacatccagcacaagtccgacgtcggcggcgtggcgctgtcgcttgcctcgccggaagaggctgcgcaagcggtgcggcgcatggcgggcgagatcccgcgcaaggcgccaacggcgcgcatcgatggctacctggtgtcgcccatgctgaacgacggcgtggagtgcatcgtcggcgtgcatgcagatcccctgttcggcccggtagtgatgttcggcctcggcggcgtgatggtggaagtcatgcaggacgtcgcgttcgcgctggcgccgctggacgaagccggcgcgctcgagctggtccgcagggtgaaaggccatcgcctgctgaccggcttccggggcaggccgccggcggatctgccagccctcgcgcgcgccatcgcgagcatttcccggcttgccgcacgcaatgccgaccgccttcaggcactcgaagtcaacccgctgtgcgtcctgcccgaagggcagggcgtcgtggccctcgacgccgtcgtgcagaccggcgcaccgggcctgcccattgcacacccgcctgccaaacaggattgatcgacatggatctttgtctgactccctcccaactcgcattccgcgacgacgtgcgcgccttcatcgcggcgcgcctgcctgccggcatccgcgaacgcctgcggcgcggcatgcgtccgcgcatggaagacaacgccgtctggcatcagacgctcaacgagcgcggctgggtggctccgcactggccgaagaaatacggcggtgccggcctcggcgccatcgagcgcatcatcctcaccgacgagctgtatcgcgcctgcgccccgcagccgctggtcatgaacatcaacatgctcggcaccttgctgctgcgctacggcaccgaggcgcagaaacagtacttcctgccgaagctgctggacatgaacgtgatcttctgccagggcttttcggaaccgaactcgggttccgacctggcatcgctgtcgacgcgtgcccgccgcgagggcgaccactatgtggtggatggacagaagatctggacgtcgcatgcgcaccacgccaactggatgttcgcgctggtacgcacggcgcagtgcgaacgcaagcaggacggcatctcgttcatcctgatcgacatgaagagcccgggcgtgtcggtgcgccccatcatgacgatcgacggctaccacaacgtcaacgaggtgttcttcgacagcgtccgcgtgcccgtcgaaaacctggtcggcgaagaggggcggggctgggcgtgcgcgaagtacctgctcggcaacgagcgcatccacgtcgccaacgtcggcttctgctgggagcgcctggactacgcgcgcgaactcgccgcagccacccgccagggggacggctatctgatcgacgacccccgggtgcgcgccgacctggcccgcctgggagcggaaatccgggcactggaactgacgaactggcgcttcctgctcgaccccgacatcgagcgcgccaatcccggcttcgcgtccgtgctcaagctcaagggctcggagatggcgcaggagctgaccaccctgatcgccggcattgccgggcccgcgggcgtggagcgccatgcgctcgataccgccgtgcccgatccgatgggcgccgccgtgtggggatacttcttccatcgggcctcgacgatcttcggcggttccagcgaagtccagaaggacattcttgccaaggcaacccggggttaaatcatgaacttcaatctgaacgacgagcagcgccagcttgccgacagcctgtcacgcctgctggccgatcactacagcttcgagaagcgccgtgcgttgacaaggccggaagccacctgcgagcccgcaatctggacgcaccttgccgcgcttggcgtgacggcgctaggcatccccgaggcattcggcggcctgggcggcggcacacaggaccgcctgccggtcatgcaggccttcgggcgggcgctggccatcgagccctacctcgcctcggccgtgctcggcacgacggctgtgcgcgagggcggcagcagcgcgcagcaggcggaactcctgccttcgctggcaagcggggaaatgcgtatcgcgtgggcccatgacgaggcggccggccggcacgcgccgctgtgggtcgagacgaccgccaggtccggtcccgatggctggcgcctggacggcgccaaggccctggtgctgcacggtggcgccgtctcgcgcatcgtcgtgaccgcgcgcacgcgcggcaaggcgcaggacgaggatggccttgcgctattccttgtcgatccgcaggcggacggcgtgacgcggcgcgcctaccggctggttgacgacacgccagccgtcgaactgacgctgcgcaacgcgcaggcctgcccgctgggcgatgtctccgacagcgtccgcgcgaccgcggtgatccgcgccacgcaggccgccggcatcgcagcggcctgcgccgacatggtcggcaccatggagacggcgcttcagctcaccaccgactacgttcgcacgcgcaagcagttcggccggccgatcggcgactaccagtcgatgcgccaccgcatcgcggacatgtgcgtgagcctcgaactcgcgcgcagcatggcggtggccgccgccgttgcgggcgatgatccgtccggggacgatgggctggccgaactgtcgcgtgccaagctcgtcattggccgccatgcccgcacgctctgccacgcggcgatccagtcgcacggcggcatcggcctgaccgaagagtacgccgtggggcattgcctgcgccgcgtgcacgtgctggaccagttgttcggggactgcgatgcgcatacccggtggctggccggacaactgggctgagcgctgcgcgatcgcgtgatttccggtcagggccccggcgcagtcacggccggggctgtccctttgctcgcccaggctcgacatgcgtagcgctcccccgatcgttctgaccgagcaggatcgtacccggctcgaagcgctcgctgcggcggcggatgcaccggccagggtggcgcagcgcgcgcgcatcatcctgctggccgcggcgggagtacagaaccaggcgattgccccgcgcctcggcatcgggcgggcccaggtggcacgctggcgcgagcgctatgtgcaagccgggctggccggcatcctcaacgacctgccgcgcggcgcgccgccggtcaaggtggacgtggcgcgcatggcggtgctgacgggcacggatggcaacgggcagccccgggcctggggcgtgcaaagcctggccaccgagctgggggtcagtccggcaagcgtctcgcgccaccggcgtgccgcgggacttgtctccggcaatatgcgcaggactggctatctcccccccgcgccgttcaccggtggcatggccgagatcgttgccctgtacgtgtcggcgccggagcatgcgctggtcctggcgttcgatggaggcgaggaccaggacagcaatgccggcgccctgcctcgcatgtgcccggcgccggcacagcagcgcagcctgaccgcatcgctgctgaccgcatcgctgctgaccgcactcagggtactcgacggcgaacttgcgcaggcgccttccgggtccggccggcacaggcagtggcttgccttcctgcaggaggtcgatgcggccaccgtgcccggccgcagcctttgggtttttgcggacaaccatgcgtgccaccagcacgccgaagtgcagcaatggctggagcgccatccgcgcatcaccgtccagctggcacccagtgcggcaagctggctgcgcacggtccaggggttcctgcgggagtcccgggccggccaggcggcctgccggacgagatttccgtccggcattccggaggcgctggcggcgatcgaggccgccaggcgctcgcgcggcgccgtgccctaccgatggatacgcgagcgcgccgcggcgcgggtgacagacgcccggaccccttcgggggcacggcggcctgtgctgccggtcgtcggcacgaaggtactgccgccgcacggcaccggccagctgatgccgcgcgaagccctgatggcccgcctcatgcagtcgcgccggcaccgttgcgtggtcatccagggtcaggcgggaagcggcaagaccagcgtgctggtggcctggcgcaaggcgatgatctccttcggctatgacgtctgctggctgtcgctgtccgtggaggacaacgatcctgcgcgcttcctcgactacctgtttgccagcattgccgagtccgcccccaccgtagcgggcaaggttcaggaggtgggggccggacacgacggcgagacgctggaactgcggatcattgcgctggtacaggagctttcccggcgcacgcgcgacctggtgctgatgatcgacgacctgcaccacgtgtccgattcgcgcatcctgcgcgcgctgcagttgctgcttgactacgccccgccgcaactgcacgtggcggtggcttcccgcaccgcgctggaactgtccatggagcgactgcgactgcagaacctgctggcggaattcgacatgcgcgacctgcgcttttcgcccgaggagtcggcccgcttcctgcttgaccgcctgggcagcatcacgcccgccgacgcggcagccatgcacgaactgaccgacggatgggtggccggcctgcaactgctggcaatcgggctgcgcaagtagcggcccggcagctaccctgtggcgcaactccgcgatccccgcgcgttcgcgagctacttcgagcgtgaagtgctggtccggctggctccggacgatctcgatgtcctgacgcgcgtggccatctgccagcgattctgtgcgtcgctgtgcgccgagatactgggccagccgcaagccgtgacgcggctcgggagccgcatctcgcagatggtggccgacaacctgttcatctcggtcgtgcccggccatgatgatgaaacgtggtaccggatccatccgctgtggcgcgagacgctgcgcggccacatcgacgatgccgtgctgcatgccgtgagggccggtgaacccgcagcggcagcgaatctggtcgaaggctgcgcgctggccttgctggcgcgcggtgagctgagccgggtggccggcctggtgcgcatgctgccggacgaacaagtccgccagcgctaccgcctgcatggcgtgatggcgtacatgcagctctacgcacgcgatttcgaggccctgcgggtctccctggcgctgctggaggcgcagcgcgacgccctcagcgcgagcgggcgctacagcctgagcctgctgaaggcagggctggcgctgcagttcgacgagagcgacgaagccgcggcgatgctcgatgagctgcgcaatgcgccgccggacacgatcgaattcgtctggcatacgcgtgccaatgtgctgtcgctgctcctcacgcaacgcggcgagcatgacctcgcccgcagcgttctggaagaggccgaccagcgcacccgctcacggcgcagctggctgctgggccgctgcatccatgcgcttggccttgcgcaggaaggccagatccaggaagccggcaggatcgtgaaggaggtgctggaagaggccgaaggcctcgggcagggctatgtgccggtggcgggcatggcagcgggcctgctggccgatacgctgtacgaactgaacgagaccgaggccgtctgccatctgctggaaccgcgcatgggcgcgctggagcgtgcgtcgctgccggaggtggtgctgcgtgcgagcctggtgctttcgaactcgcactggcaggccggccgcagcgcgcaggccctggcctgccttgaccgcctcgaagcctatgccagacggtacgcgctggaccgcgtgctggccgaagcgatggtgctgcgtctgcgccggcatttgcacggcggcgagatggagcaggccgcgctcgtgctggatcgtgtcgaagcgctggcgtcgcgccacgccgggtccggccctggaaagtctgcccagatcgcacgcgcggcaagctgcgcctggatcgatatggcgctgtacacgcgcaatttcgccggtgcgctggagcgcatccccccgctgatcgccggcggcgaccagagcgccggcacggtcggcctgcgcatgcagcttgccgcggcgcgcctgggcctcggcgagacgcaggctggccgggacgacttcatcgaggcaatgcgcgtgggacatcggctgggcctgtcgcggacgctgctggatgccttgcagaccgtgccggatgctctcgatatgctggcgcgcgatccgttgcctgatcccgtcctggcgttccaggtccagcgcctgatgcatgcgctgcgctcggctgcgggccggcatggccgcgcgacaggcggccacgaagccgacgccttgcgcctgctcagcgggcgcgagcgggagatcctgcaactgctggcccaggccatgtcgaacaagaagatcgcgatgatcctgaacgtctccgccgagacggtcaaatggcatctcaggaacatctacgccaagctgggcgtcggcagtcgcgcgggcgctgcggcattgctgcgcgacatggccgggccggcggcggcgaaccactgatctccccgcagggcaggactgatccggaaacccacgacatcgcagtcatccctgcagccacggaagctgcgccctcggggcgctcgcggcgcagtccatgccgtgtaccggcggcgcacatccgttctcataccaactggcgcacaccccgtcaaactccggctccggccacatctccaacccgtgccggggaggcggctacgttccgggcgcgtgccgcgcgtggtgggcctggccgtggcgaaggacatgatgatgaccgcgcgccgcatcggcgtggaagaggcaagggagcttggtatcgtccattccgtctacacgccggaggcattgccggaggaggcccgccgcctcgcgcgccgtttcctggcgggtcccccgcaggcgctcgggcagaccaagcggatgctcaatggcagtttcgagacctcctacgcagtattcgtggagcttgaagcgaacgcgcaggccgtggcgaccaccacggcttatcacgcacaggcgctgcagcgcttcgcgcgcggccaacccttgcgtttcgactgggaccgtgcagagtgatgctcgcgcttgccggcaagggcttgccgtgcgttgccgcggtcatcgcggtgtgtcggtggtcctcccaatcagaagccacgtttgcaggtcaccgatgccctttgccggaaccagtccgcgcgcttcaagcaggaatggttcgccaagcttctgccgggtggcttccgttacctgaacgcggccgaccacgccctgggactccatccggctggcgatattcacggtatcgccccataagtcgtagatgaacttcctgcgcccgatcacgccagccacgacagcgccgctgtggatgccaacccgcaactgcaggttgtagccgcttcgccgattgaatttgcccagcgactcgatcatgtccagcgccatatgagcggcccgaacggcatgatcggccgctggcaccggcaggccggcggctgccatgtaggcgtcgccgatcgtcttgatcttttcgagcccccggctgtccgcgatattgtcaaattcggcaaatatctcgttcagtactgccaccagccgttccgggttcaggctgggggaaaaacgggtgaactgtacgaggtctgcaaatagaacggacacttcctggaacttgtcggcaatgacctccggaggggcggcggcaatgagatcggggcgcagcttcagacgctcggcaatgggggcgggcagcacgttgagcagcagccgttcggtcacctgttgctcgcagacgagcttgtcgtaaaggcgcctgagctcgtcgctctggcgaacgatggtctcccggctcgtttccagttcgcgcaccttccgctcgagttccttgccgtatttcagcgattccccgtgcagcaggcgcacttccagcatattgcgaacccgcatcagtacctcggccaggtcaaacggcttgctgacgaagtctttcgcaccggcttgcagcgcgcgcaccttgtggtctggctgggccgtgatgacgatcaccggaagataactgtctgcctggatctgcttgaggccttccatgacctcgaaaccatccatgccgggcatctggagatccagcaggatcaggtcatagtggttactgctgtgaagctcgcagacccggcgtggatccatggttgacgcaacgcgagcatagccggccccgcgcagcatctgctcgagcagcaggacattggcctccaggtcgtcaacgaccaggatccttgccgccagaatgtccgatgcgctgatcatgtcgtgttgcttcacggactccggacaggccctccgtgggcgagctccaatgccgcgttcagtgcgtccatgaactcgttgagcctgatcggcttggtcagataccggaagaagcccgctttcgtacctttctcgatatcgcgcggcatcgcattggcactgagggcgatcaccggaatgtgcgctgtcctggggtcttcgcgcagaagtcccagcgcttcgatgccgttgatatccggcagatggatatccatcacgatcacttctggcagggcggtgcgcgcgagttcgaggccaagcgttccggtgatcgcggtcagcagccgcatacccgcccggcgcgcgatgagttgctcgaccagtttcaggttggcggggttgtcttcgacatacagcagggtatgcgctgaagggccgtgctctgattgcgcctgcgccggtaccgccggctcgacgctctcgcccgccaattccggggggcgggaagcgggcagttcaacccagaatacgctgcctgcctcaaccgcactttcggcgccgatgctgcctcccatcagttccaccaggcgcttggccaccacgaggccgatgcctgtgccttcttcggggcccgcttcttgcccgaggcggttgaacggccgaaaaagttgtgcgagctgctcccgtgccaatcctgcgcccgtgtcgcgcacgctgatgcgaatgcggtcccctgcggtaacgctcacttcaactgttccttgatctcggttgtatttgatggcgttagacaggagattgagcaggatctgctttagccgggtgcgatccgcgcgaacaaaacatgggaaattgaacgatgggaagcgcatgcgaacccctcgcttcagtgcctgctgttcgaccatggcgtggcattcgcgcaaggcttcggccagggataccggctctggcgacagcgacgcctgcccggcctcgatcttcgcgagatccaggacctcattgatcaattccagcaaatgccagccggctttcagaatctggtcaatgctggcctgctgcgcggggggcggcggcggcgaatccgaagccatcaactgcgcgaagccaaggatcgcattcaaggggctccgcaattcatggctcatgctggaaaggaaatcggatttcgcacggttggcgccctcggccgctgcctgcgcccgcttctggtcctcgatgtcggtgcaggtcgcaaaccactttacgatatttccgtcgcgatccttgaatggcgctccgcgggcaaggtggcatcgataggcgccatcggaagctctcctcaggcgaaattcgagttcatattcgcacccgcttgcatgggcgcttctccagcgtttgctggtgccttgcatatcatccggatggacgacagtctgccaagccccgagttgggtttgctcaagcgtaagtccggtataggtagaccagcgctggttgcagtagtcgatccagccatcgggtttcgcggtaaacacgatatggggtatgccgtcggccagcaatctgaagtgctgttccccctcctgaatgccggaggctgagggagatggctttgccgaccggtgcgtggatggcttgcgcatgatctgccacaacaaaggagcaaaggagagactgcccgcgcggggcggatgtcagtttcaacgagggactcctgacgaggatatgcgcttccgccgccggcagggcaattttgctggctgctgaacatcgacgtatccaagccggcacatttccacgacatcttggattccccgggtagtgcgagttcgagcagcactgctaggccaggctccgcgctccgcccccattgcgcattgcacggcggccaagccgggattgcctggtgcaccggcaatctccggtcaccggtgtcatcgccgcgatgccaaccaatacatccaatgtatcggttgacataccgaaagtatttttccgccggacttccgatccgtaccatcgcctcatggatttcgaggagacgacatgatcccggcagcaccacgcaaaaacgggggcgcgcaatgacaggccccctccaaggcgttcgcatcatcgacatgaccacggtcctgatgggaccgtacgccacacagatcctcggcgacctcggtgccgacgtgatcaaggtcgaacctccgacgggagacaccgtccgcgacgtgggttaccgccgcaacgacggcatggcgggcatcttcctgcacgtcaaccgcagcaagcgcagcatcgtgctggacctgaagaagccttgcgggcgcgatgcgctgctgcgcctcgtggccgacgccgacgtgctggtctacaacgtgcgtccgcaggcgatggcgcggctgaacctgggttacgaggaaatcgccaaggtcaatccaggcatcctgtacgtgggcctctacggctatggccaggccggcccctatgcggccaagacggcctacgacgacctgatccagggcgccgtcgccattcccacactgtcgaagatggccggtgccgacatcccgcgctacgcgcccagcgccattgcggaccgcatcgtcggcatctccgccgtgaacgccatcaccgcgggcctctaccaccgcctgcgtaccggcgaaggccagtccatcgacgtgccgatgttcgagaccatggcgcagttcatcctgggcgaccacatgggcggcgcgaccttcgagccgccgctcggtccgacgggctatgggcgtgtgctcgatcctaaccgccgcccgtaccgcacgaaggacggctacctctgcgtgctggtctacaacgacaagcagtggcgcaagttcttcgagctgatcggcaagccgggcctgatggacagcgacccgcgcttcgccaccatcggcgagcgcacgaagcatatcgacgctctctatggcatggttgccgaggtgatgcccacgcgcaccagcgcggagtggaccgcgctgctggagtccaccgacatgccggtgatgcagctccacaccgtcgattcgctgatgaccgacccgcacctcgacgcggtgggcttcatcgacgtggtcgagcacccgaccgaagggcagatccgctcgatggcgatcccgtcgcactggtcgaagaccacgccgaaagtggaacgccaggcaccgcgcctcggcgaacacagcgcggaagtgctggccgaggccggcttcagtgccgacgagatccgcaagctcgcggaagagggcgtgacgctgatcgcgcccgccaccgagtgatacccccacattccggagtttcatcgtgactgcaagtctcgaatcgttgccgctcgtcgccatcccgccggcggacgaagcgctgcgcggcccgatccgcgcattcctcgaaggaaagctggccaacgtgccgacgcatatccgcgcccgcacctggatgggctatgacgccgacttcagccgcgcgctcgcgaaacagggctggctcggcctcgccctgccaaaggagtatggcggcgccggccgcagcgcattcgcccgcttcgtgctggtggaggaactgatcgccgccggtgcgccggtgtcggcccactggttcgccgatcgccagaccgccccgctgatcctgaagttcggcacgccggcacagcgcgagtttttcgtcccgcgcatggtgcgcggcgagatcttcatgtgcatcggcatgagcgagcccgacaccggctccgatctctccagcgtgcgcacgcgcgccgtacgcaccggcacgggctggcgcctgaacggccgcaagatctggacgaccaatgcccaccgcacgcagtacatgtgcgcgctggtgcggacgtcgggccagcacggcgaccgccacaagggcctgtcgcaggtactgatcgacctcagcctgcccggcatcagctaccgcccgatcaaggacctcgccggcgacgcgcacttctgcgaagtcgtcttcgaggacgtggacctgccggccgacgccatcgtcggcgaagaaggctcgggctggaagcaggtgactgcggaacttgccttcgagcgcagcggaccggagcgcatcctgaccagccagctgctggccgagacgtggctggccgaagtgcgtgcgtcgggccttgccgtgcccgattcggtgaaggtcatcgccggccgcatcgccggccgcctggcggcgcttcgcacgatgtcgctcgccgtcgccgacctgctcgacaagggccagaaccccgagaccgacgccgcctacgtgaaggacctcggcaccgagttcgagcagaccgtgccgggctggattgcctcggccatcgagcagatgccggacttcgcgccgtcggagacgctgcaacgcgcgctcgcctacatcacgcagctttgcccgagcttctcgctgcgcggcggcacccgccagatcctgcgcggcatcatcgcccgctcgctgggcctgcgctaagacattaccggagacgaccatgactgattccctcctggaaggcttcgagcgcgccctcgccgacctgtgtgccgacgaagcggtacgccgcagcgaagcggccgaaggcgccgccgggcaatgggccgccatcgacgcgctcggctacaccgatgcgctcgtgcccgcagagtgcggcggcgccgggctgtcgcttcctgaagccttcccgctgttcctcgccgccggccgggccggcctgagccacccgttcgccgagaccgccatcgcccgcgccatgctggcgaaggcggggcgcgagagcacgggcgagtgcattgccatcgctcccgccgccgctggctgccagcacatcgcctgccgcaacgtgccaggcggcgcgctcgccgatctcgtgctgacgcagtggcgcggcgaatggctgctcttgccggtgagcgccgcgatgcacaccccgggcatctaccgcccgctggcatcggcctcgctgcaatggcagtcggctgacgtggcggtcttccgcttccgcgatgacgacgccgacctcctcgcgctctgcaacgccgcccacgccgccggcatggcgggtgcgatgcaacgcgtgctggccatgagcgtgacgtacgtcaacgatcgccagcagttcgggcgcgcgatcagccagttccaggcgatgcagcaggaactgagcgtgatggccgagcaggccagctcgtcggtgttcgccgcccgcctgggctgcgcggccgccggctggctgcccgatccgctgcgcgccgcgtcggccaagctgcgcgcctgcgaggcgggcgaacgtgtcgcggccatcgcccacgccgtgcatggcgccatcggcatcaccgaggagctggcactgggcctgttcacgcggcgcctgcatgaatggcgcagcgtgggcggcagcgagaccggttgcgcgaagctgatcggtgacgcgctgttcgcgcagagcggcgcgtcgagccaggtgattctcgacttcgcgcgcacccagctcgcattccacgcctgaggccaccatgctgaacaacaaggaatccatcgtcatcgtcggcgcgaagcgcacgccgatcggcgcgttcaatggctcgctgtcggcgttcaaggcgccggagcttggtgccgtggccatccgtgccgccgtcgcgcaggcgggggtcgatccggcttcggtcgacgaagccatcatgggcctgtgcctgtttgccaacgtcggccaggcaccggcgcggcaggcggtgctcggcgccgggctgcccacctctacgccggccaccactatcagcaagatgtgcggctcggccatgaagtccgtgatgctcgcgcatgacctgctgcttgccggcacctgcaacgtggcggtggcgggcggcatggagtcgatgaccaacgcgccgtacatcgtcccgcgcggccgctacggctaccgccttgggcacggccagttcctcgaccacatgtactgcgacgggctggaggacgcctacgaaggccacctgatgggctactacgcagacctcgccgccgaggcgcgcggcatgggccgcgaggcacaggatgcgtacgcccgcgagagcctgctgcgcgcgcaggcggcggtcgccgaagggcgcttccgcgacgagattgcgcccgtcacgctcaagcgcggcggcgagtttgccgaggacgagacgccgggccagtgcgacgccgccaggctgccgaaactgaaggccgtgttccgcgacggcggctcggtgactgccggcaatgcctcgtcgatctccgacggtgccgccgcgctggtgctgatgcgcgagcgcgatgccatccgcgagggccttgcgccgctggcccgcatcgtcgcccacgccacccacgccaacccgccgcagcagttcgccgacgcgccggtgctcgccgcgcgccgcgtgctcgacaaggcgggctggaccgcgcgcgacgtcgatctctatgaagtcaacgaggcgtttgccgtggtgacgatgatcgcgctggacgagcttggcatcggccacgaccgcctcaacgtcaacggcggcgcctgcgcgctcggtcatccggtcggggcgaccggggcccgcctgctggtgacgctggtccacgcgctgcagcagcgcggcctgaagcgcgggctcgccagcctgtgcctgggcggtggcgaagccacggccatcggcctcgaactgtgctgaggagccggccatgagcgttctgcatcgcatcgagaacggcgtcggctggctgaccatggaccgcccggcggccatgaacagcctgaaccgcgagatggccgccgccatgaccgcgcaactcagggcatggcgcgacgaccccgccgtgcgcgcggtggtgcttaccggcaacggccgtgcgttctgcgccggggccgacctcaagcaagtggccgagccgcctgtgaccggcgagccggatttcctcgacgtggtggtcggcttcgtcgacacgctgcgcgcgtttcccaggcccgtcatcgccgccgtgaatggcatggcgctcgcgggcgggctggaaacggtgatggcctgcgacctcgtcctcgccgccgagagcgcgaagctgggcgacgcgcactcgaacttcggcgtgttccccggggcgggcggcgcggcggtgctgccgcgcaaggtgcctgtcaacgtggcgcgctggctgctgttcaccggcgcaagcttcaccgccgcgcagatggaacgcttcggcctggtcaacgaagttgtgccggacgccgaactcgctgcccgcgcacaggccgtgggcgaattgctggcggccaggagcccgctggtactcgcccgcatgaagcgcgtggtggccgaggccgccgacaagccggttgccgacgcgctccgtcaggaactgctcgaactgcgcaaccaccagcgctcccatgacatgcgcgagggcttgctggccttcgccgaaaagcggcagcccgtcttcaagggctgctgaaccgacacaaggaaccaccatggacttgctctactcggaggagcacaaggcgttccggcaggaagtgcgcgactttctcgccgccaacctgccggacgacatgcgcgagcgcctgcgcgccggcggcttcgccaccaaggacgacaacgcactctggcaacgcaggctgaaccagcgcggctggggcgcgcccgcctggccgaaggcatttggcggcgccggctgggacgccgaccgccagcgcatcttcgccgacgaatgcgctgccgcgccggcaccgacgccgcacccgttcaacatcaccatgctggggccggtgctgatccacttcggctccgacgtgcagcgtgagtatttcctgcccaagcttctgaacgccgacatccaggtctgccagggattctcggaaccgggctccggctccgaccttgcctcgctgaagaccacggctgttcgcgaaggcaatgagtacatcgtcaacggccagaagatctggacgagccaggcgcattacgcggactgggccttctgcctggtgcggaccgacgtcgacgcggtgaagaagcaggccggcatctcgttcctgctgatcgacatgaagtcgccgggcatcaccgtgcgcccgatcatcagcatcgacggccgccacagcctgaacgaagtcttcttcgagaacgtgcgcgtgcctgccgacaacctggtgggcgaggagaacaagggctggagctacgccaagttcctgctcggccacgagcgcgcccacatcgccggcatcggccgcaacaaggagcgcgtggcctgtgccagggcgctgctggcgaagatggaggacgagggctacccggaggcgacgctggcagcctatcgcggacggattgccatgatcgaagccgacctgcatgcgctggaagtgacgcaactgcgcgtgcacggcgggcacgccgacgcgaagctgtcgccgatgctgaaggttcgcggcagcgagatcttccaggccgtcaccgacctgctttgccggatgaccggcaccggttcgctgcccgccgacggcgccgacgtgacgctgacccggtcctacctgtactcgcgcgccgtctcgatcttcggcggtaccaccgaagtgcagaagaatatcctttccgcttccctcctggatctgtcatgaacctgcaactgaacgacgtccagcagcaactgcaggacagcctggggcggctgctggcccgcgagtacgacttcggccgccgccagcaatatgcggcgtccgctgccgggcattcgcccgaggcgtgggcgcaactggccggtctgggcgtaacggccgcggccatcggcgaggcgcatgacggcttcggcggcgacgccgtcgaccacatgatgatctccgaggcactcggcaagtgcctgtcgctggagccgtatcacggcaccgtggtcatggcggccacggccatcgaacagctgggctcgcccacgcagcagtccagcctgttgccgcggatcgcgcggggcgaactccaggtggcgtgggcacatggcgaatcggtgcccgggcgcatcgccacgcgcgctgcccatggcgtggatggctggcggctctatggcaccaagccctgcgtgctgcatggcaccggggcggattacttcctcgtgaccgcgcaggcgccgaatgagggcgtccagctgttcctggtcaatgccagcaccacgggcgtgcgcaacgccggcggccgcctgatcgatggcaccccggcggcggacctggcgctggatgacgccgagggcgagcggcttggcacgctgacgcccgcgctgctgacccgtctgctggaaaccggcatcagtgccgcctgcgccgagatggtcggcgcgatggatggcgcctgcgcgctcaccgtcgcgtacctgaagacgcgctcgcagttcggtcgcgtgatcggagcgaatcaggcgctgcagcaccgcgtcgtcgacatgctgaccgcgctggagcagagccgcagcatgtcggtctcgctggcgcttgcactggcagggcgcaatgacctgaccggcgccgaggtgccggtccacgcggccaaggtgctggtgacgcagaacgcgcgccacgtcgcgcaggaagccatccagctgcacggcggcatcggcatgaccgaggagtacgccgtggggcactacctgcgccgcatcctcgtgctcgaccagctgcacggcgacatgcaataccacctcggctacctcgagcggcgcgccgcctgatcggctggcagcgccaccccaaagcaatccccatacatcccaaggagacaaaccatgtctgacatcatgtccctggccggcaaggtcatcatcgttaccggcgccgcgcagggcatcggccgcgccaccgccgaactcgcgctgagcctgggcgccagggtttgcgtggtcgacctgcagcgcgaagcgatcgaggcgtttgccgccgagcaccccgaccatgtccaggcctatgccggcaacgtggctgatcccgacttcgtgtcgtcgtccgtcgagcacgcggtgtcccgcttcggcaaggtcgatggcctggtcaactgcgccggcatcgtgcgcgccgcgatgatcgagaacatgacgctgaagacctggcacgacgtggtcgactgccacctgaccggcgccttcctctggctgcaggcggtgggctcgcgcctcgtcgagcgcgccaaggcgggcgagaaggtgcagggctcgatcatcaacgtctcgtccgatgccggccgccgcggctcggtcggccagatcaactacgcgtcggccaaggccggcatgttgggcatgaccatgagcgccgcgcgcgagtggggcaagttcggcgtgcgcacgaactcggtctgcctgggcatggtggaaacgccgatgaccgagaccatccgcggcgagcgcttccgcgacacctacctggcgatgatcccgatgggccgctgggcgcagccggaagaaatcgccgcgccgatctgcttcctgctgtccgacgccgccggctacgtgctgggccagcacatcggcgtgaacggcggcctgcacatggcgagctgagggcggcatgtcgacacgcgatctctatacccacgcgcaactgcggcgcctcttccatccgcgcaccatcgcggtggtcggcgcgacgccgaacgctcgctcgttcgccggccgggccatgacgaacctgcagcagttcgacggcaacgtgctgctggtcaacccccgctaccccgaggtgaacgggcaggtctgctatccgtcgctgtcggcgctgcccgaggcgcccgactgcgtgctgatcgccaccgcgcgcgaaacggtggagcccatcgtgcgcgagtgcgcggggctgggcgtgggcggcgtggtgctgttcgcgtcgggctatgccgagaccggcaatccggagcagattgccgagcaggctcggctggtcgccattgcccgggaaagcggcatgctgctgctcggtccgaacagcatcggctatgcgaactacatcaaccatgcgctggtgtcgttcacgccgctgcccgcgcgtggcggcgaactgccggcccatgcgatcgggctggtcagccagtccggcgcgctggcatttgcgctggaacaggcggccaaccacggcacggcgttcagccacgtgttctcgtgcggcaatgcgtgcgatatcgacgtgaccgaccagatcgcctatctcgccggggatccctcgtgcgcggcgatcgcatgcgtattcgaagggctgtccgacgccagccggatcattcgcgcggcgcaagtctgcgcggaagccggcaagccgctggtggtctacaagatggcgcgcgggacggcgggcgcggcggcggccatgtcgcataccggctcgatggcgggatccgaccgcgcctacagcacggcgctgcgcgaagctggcgtggtgcaggtcgataccatcgagcagctcgtgccgacgacggtgttcttcgccaaggccccccggccgacgacgtccggcgtggccatcgtctcgggttcgggcggcgcgggcattgtcgccgccgacgaggccgagcgtttcaacgtgccgctgccgcagccgtgtgacgcgacccgcgccgtgctcgaatcgcacattcctgacttcggcgccgcgcgcaacccgtgcgacctgaccgcccaggccgccaacaacttcgactccttcatccagtgcggcgacgcggtcttcgccgatcccgcctacggcgccgccgtggtgccgctggtggtgaccggcgacggcaacggccgccgcttccaggtgttcaacgacctagccgtcaagcacggcaagatggcgtgcggcctgtggatgtcgaactggatggaagggccggaggcggtcgagtccgaggcgctgccgcgccttgcgctgttccgctcggtctcgcactgcttcgcggcgctggccgcgtggcaggcacgggagcaatggctgttgtcgcgcgccacgccgaagccgccgcgcctgacacacgcttcggtggccgccgaagcgcgcgcgcgcatcgttgccgcgccggccgatacgctcaccgagcgtgaagccaaggacgtccttgccatgtacggcgtgccggtggtgggcgagtccctggcgacgagcgagcaggacgccgtgcgcgccgccgatgcctgcggctatccggtcgtgctgaaggtcgagagcccggccatcccgcacaagtcggaagcgggcgtgatccgcctcggcgtgaactcggcgcaggaggttgccgtcgcgtaccgcgaggtcatggcgaatgcgcgcaaggtgaccgccgacgaccgcatcaacggcgtgctggtgcagagccaggtgccgaccggcatcgagatcttggtcggcgcccgcgtggacccgcacctcggcgcgctgctggtggtggggctgggcggggtgatggtcgagctgatgcaggacacggtcgcgaccatcgcgccgtgctcggcgcagcaggcgcgcgccatgctggagcagctgcgcggcgtggcgctgctgaagggcttccgcggcgcggcgggcgtggacatggacctgctggcggaaatcgtcgccagcctgtccgagttcgcggcggaccagcgcgacgtgatcgccgagttcgatgtgaatccgctgatctgcacgccggaccgcatcgtggcggtggatgcgctgatcgaacggagagtgggggcctgacgggccgctccggtgccggcggggagggcgttcccgccggcatcggaaacattcaggcggcggcgcgaagcggcgcttcgaccgccgcctcctggctggccgcgccggtgacctcgtgcgccagtgccacgaagttgcgggtggtggcgtgcatgttgcccggcagcgttgccagtgcgatgccgaattccatctgcgccggcagcccggtcagcggaacatgccggataccgtcgccgcccagccgggcggtggaggccggcaccagcgccacacccagcccgctctccaccagcgcgaggatggtgggtacctgcaccgcttcctgcgcaataggcggctggatgccggccacctggaacgcatgcatcatcagcgaatgcatcgccggcacgcgggcctgcgaatagacgatgaacggcgtgtcgcccaactcggacagcgcgatgtgcttgcgccgtgccagcggagaatcggcgctgacggcgagcatcatcggttcggactgcagcagcgcgatctgcagcggcgtcttggcgagcacgggatagcgcaccagcgcgacatcgagcacgtgttcctcgaccgcacgcaacaggtcgaccgtcgtcgattcctcgatgatcagctccacgtgtggataccggccgcgaaatgcccggatcaggcgcggcatcagcgaatacaccgacgagccgacgaagcccacgcgcaccttgccgcgcacgccgttctcgccttcgctggccgcgtggcggatctcgtcggcgaagtacagcgtgctgcgcatctgccgcagcaccagctcgcccaccggcgtgagcgtgagaccggacgggtggcggtcgaacagcgtcacgccgagttcctcttccagcttgcggatggccgtggacagcggcggctgcgccatgcaaaggcgctcggcggcgcggtggaagttaagcgtttcgctcagcaccagggcctggcgcatctgtcggaggtccatcttggaagttgcctgatatacgatatgtggttgaagaatacgaattgtcgcagaataagacaaccggattcgggtattccctgatcgggttgcgtagcgtcgcgcactttggcgggcgtggaaatgcatcggggcggccttggccgccccgcgtattgctttcaggtctcctgccgcgccggcttacctgggctgcatccggatcgccccgtcgagacggatgacctcgccgttcagcatcgggttgccgaccacggcttccaccagccgcgcatactcggcgggccgtccgaggcgcgaggggaacggcaccatcctgcccagcgcgtcgcgcacggtttcgggcaagcccatcagcatgggcgtttcgaaaaggcccggcgcgatggtcacgcagcgcacgccgtcgcgcgccaggtcgcgggcgatggccagcgtcatcgacgctacgccgcccttcgacgcggcataggccgcctgcccgatctgcccctcgaacgccgccaccgacgcggtgttgacgatgacgccacgctcgccgccggcatcgggcgcgttgcccaccatcgccgcggcggcgaggcggaccatgttgaaggtgccgatcaggttgatgcgcacggtgcgctcgaaggcgtcgagcggatgggggccgtccttaccgaccgtcttgcacgcgggcgccacgccggcgcagttcaccagtccggccagccggccgagcgcggtggcggcgtcgacggcggcgcggccgtcggcctcgctgctcacgtcgcagcgcacgaagcggccgcccagttcggcagccagcgcctcgccggcggggttgatgtcggcgatgacgaccttgccgccggcggcggcaatcatgcgggcggtggcttcgccgaggcccgaggcgccgccggtaacgaggaagacgttgtcgcggatgtccatgccagtctcccgctcagcgcttcagttgcgccatgtagctgtcaagcgcggcctcatggtcgttggtgtggtgcgccagcgcctggaagccggccgacatttcgaggatggtgtcgaggcgggcgtgctggccttccttcagcagccgcttggccatgcgcagcgcatggccgggattgaccgcgatgcgctgcgccagttccattgccgtgggcatcagcgcctcctgcgggaccacgcgcgagaccagtccccattcgagcgcctgcgcggcgtcgatggtatcgccggtgaagcacagctccgccgcacgcgacatgcccacggcgcgcggcagcagccacgcgccgccatcgcccggaatcaggccgagcttgacgaaagtggcggcgaacacggccgtttcggatgcgatgcggatgtcgcacgtgcagacgaggtcattgcccgcgccgagcgccggaccattcactgccgcgatgaccggcacttcgaggttcgacagcgccagcggcaggcgctggatgccgtcgcggtaggcgtagcgggccatcaccggctcgcccgactcgcgcccgaaggtggcgcgcaggctcttcaggttgccgccggaggaaaaggcgggaccggcgccggtcagcaccacgacgcgcacggaatggtcgcggttgacggcttcgcacatctcgaccagcgcctccacggcgtcgttgtcggacagcgcgttgcgcgtctgcggacggttcatggtgacgatggcgatggcgccttcgcgttggatatcgaggaaattgctcatgacagactgtggtggggaagacgtgtggtttcggccgcgttcaggcaacggccggggcaggggggcgcggtgtcagcgccgctggcatttctccgacacggcgcgcgcagcgtcgatgcggccgggcggcagccagcccgccaggacctcggcaatcccggcggcgtccggcgcgcgcggcgccgcgggcggcaccgaaggcgtgcggctgaagcgcggcgcgggcgccggatgcatgatgccgtccacctcgacgaaggtgccgcgcgcgcgcaggtgcgggtggtgcggcgcctcgtggtagttcagcacgggggcgaagcaggcgtcggtgccatcgagcagggcgcaccattcgtcgcgcgtgcgggtgcggaagacttcggccagtgccgcgcttccggcttcccagttggcggggtcgttctggtcaccaaggctcgcagggtccacgccaatccggctgagcaggtctcggtagaagcgcgcctcgacagggccgaccgagatccagccgccgtccttgcacgcgtagacgttgtagaagtgcgcgccggaatcgagcacgttcgtgccgcgctccgggcgccactggccggcggcggcgaggccgaagaacaccgcgcccagcgcggcggcgccatcgacgatggcggcatccaccacctgtcccttgccggacttgcccgcctcgatcagcgcggccagcacgccggcgacgaggaacatgccgccgccggcgaagtcgccaaggtaagccggggggatggccggcgggccgccgcgctggccgatggcattgagcgcgccggtcagcgcgatgtagttgacgtcatgccccgccgcgttggccagcggaccgctctggccccagcccgtgacacggccgtacacgagccgcggattgcgccccatgcacgcgtccgggccgaggcccatgcgctcggtgacgccggggcgaaagccttcgatcagggcgtcggccttctccaccagttccagcacggtcgccacggcctcgggatccttcaggtcgagcacgagggacttgcgattgcgcagcatgaggtcgtaccggcgctcgcgcttcacgccgagatcgacctcgcccggacgctcgatgcgcagcacctccgcgcccatgtcggcgagcatcatgccggccagcgggccggggccgatgccggccagttcgatgatccggatgcccgcgagcgggcccttcctggtttcctggtctgatgcgtgcatgtttttgctctactccacggggatgccggcagtctttacgatgtcgcgcgtgcgttgtatctcggcgagctggaagtcgcgcaggcgggtggtgctgccggtgtacacggtgccgcccaggctctcgacgaatttcacgccggcgggcgcctgcagggccgcgcgcacggcgtccgacaggctcttgatgatcggcgcgggcacgttggcgggcgcgaagaccccggtccacgccgaaacgtcgaagcccggcgcgccgctttcggccacggtgggcacctccgggagttccttgagccgatgggtgtcggtgaccgcaagcgcgcgcaggcggccggcccggaccagcggcatgaccgcgctgatctcggccatggagtagtccacctgtccgacggcgacgtcggtcatggccggggcggtgcccttgtaggcgatcggggcggcgtggataccgaagcgctcgttgagcagttcgacgaacacctggtagccggggctgccggcggcgtagttgagcttgcggggcgccttgcgcgcgccgtcgaccagctccgcgagcgtccggaacggggagccggtcggcaccacgacgacgagcgcgaagcgcgcgatgcgttccaccggcgcgaagtccttgacggggtcatacggcaggttcctgaacacggcgacgttggtcaccatggtcgagttgctgccgacaaacagcgtatagccgtcgggcgcagcctcggccgcggcgcgtgcgccgatgaagccgttggcgcctgggcggttctccaccacgaacggctggtggaacttcgccgagagtgcctgggcgacaaagcgcgcggtcgtgtccgtgccgctgccgggcggcagcgagacaatgatcttgaccgggcggttcgggtaagccgcctgcgccagggccggttgcatccacgcggacgccgcggccaccgcgcacgccgccacacatgtcgccatgaggcgccagcgccgccaatacggcaatcggggtagatgaaaggccatgtcgtctccttggttccctggtctggtcgtgatcctgcaaggggacggcacgccgtcctttgagggagtccgacagatgctaagaagctggcgcagttgtgaaaaatactttcggtatgtcgatcaatacatgggatgtatcggcgcgtgccggccacggcaaggcagagggacccgcaatgcctgatccaggtggcggatcgttccctgcgccacgaactttgattagggttttcctacgatatatggcgaaacactacgaaaacacgtagtattggatcgtcggtatctggaaggtgtccacgacatctcgtaggaatcagccggcacagggagtctttggatccggcaagagaccggtgcgatacacaggagatagttggacatgctgtcacgaatccggagccggcgcccccggttccccggcctcgcccgccttcccaggcgcttcggaacaaccctggcggcggccgccgcagtcgtgtgcggcctcgccgccgcgacgagcgcatcgcccgcgcgtgcgcaggacgggtatcccgccaagccggtcacgatagtggtgcccgcgccgcccggcggcatcaccgaccagcttgcccggctcgtcgcctcgcatatggccagggacttcgggatccaggtcgtggtcgacaaccggggcggcgccggcggcaacattgccgcggaaatcggcgcgcgtgcgcagcctgacggctacaccgtcctgatgggcacgcagggcatgtttgccggcaaccagttcctctacaaggcgctgcgcttcgatccggagaaggactttatcgcggcacaaggcctggtcaccattcccaacatcctggtggtgaacagccggttgccgttccgctcggtcgcggacctggtcacgtacgccagggccaatcccggcaagctgaccgtggcgtccgtgggcaacggcacggggacgcacctggccgccgaactcttccaggcccaggcgggagtgaagttcgtccacatcccctacaagggcagcgcgcctgtcatcaatgacctgctggcgggacaggtcgacatgaccttcgactaccccgtttcgacgctgccgcagatccaggcgggcaagctgcgcgcgctcgcggtcacgagcaaggcacgcctgcccgcgctggcgcaggtgccgaccgtggccgaggccggctatcccggggcggaagccacgtcgtggatcggcctgttcttcccggcccgcaccagtccggccatcgtggccaggtggcaggccgatatcggccgcctgctggccgatccggcggtgaccgccgagatccagcggatgggcgccgcgccgctgccgcttggcggcgaacgtttccgcgccttcgtggcatccgaacgcgggaagtggaaggccatcatccagcgctccggcgccagcattgactgagcccggctccccgacacccaggcagtcccaggccgccctgcatggcgcggcgcgaggctgccccatcggcagaggcgcatatgcgtgtagcacaccagatcatcctgaccgaccaggatcgctcccagctcgaaacacttgccaccgcgccggagaccccggccaaggtggcgcagcgcgcccgcatcatcctgctggcggcgcaaggcgagcagaacaagatgattgcgccccgcctcggcatcgggcgcgcacaggtcgcgcgctggcgcgagcgctatgcccacgcggggctcggcggcatcctgcatgacctgccgcgcggcgctccgcccgtcagggtggacctgacgaggctggcgaggctgactggcgcagacggccccgacgcgacgcgcggctggagcatgcgcggcgtggcggcggaactgggcgtcagcgccgcaagcgtctcgcgtcactggcgcgcggcgggactcgcttccgggcttggcggccttggcggacttggcgggttgaatgggatcaacggccgtgcatccggcccggcgccgttccatttcaccgggcgggctgtcgaaatcgttgccctctacgcagccgggcccgagcatgcactggtgctggcgttcgacgagcctgcgcatccgctggccgcccctggcacgtcgggggcggggggccagaacctgcgctcgctgccggcgcaccagcgcagccttgccgcatcgctgctgacggcgctgcggatgctcgatggcgggcttggcgacgcaagcgccggcgcccagcacgaaagctggctgggcttcctgcgcgacgtggaggcggccacgcccgcggaccggcacatctgggtcctgtcggacaactacgccagccaccagcatgcggacgtccagcactgggtccggcgccatccgcgcgtgatggtgcaactggcacccaacggcgccgcctggctgcgcatggtgcagcggttcctgtgcgatgcgcagaccgtgcgccggtcgagttttccggccgccattccggaggcgctggccgccatcgaagcggctgcgcggtcgcgcggcgcgacgccgtatcgctggatccgccagaccgtgccgcacggtccggccaacggccaatcgcgggatatgccggatatgccggatgcgccggacgttccgctggagccgcaagccgcgagcccgctgttgctgcctggccatgccgtggccgagggcgaacgtcccatccaggcgatcaccagcaccaaggtgctgccgccgcgcggcgcccggcaactgatgccgcgcgaagcgctgatgggccgcctgctcgacgcccgccgccaccgctgcgtgatgatccacggccaggcgggaagcggcaagaccagcacgctgatggcgtggcgcaaggccatgatctcgctgggctacgacgtctgctggctgtcgctggcggccgaggacaacgagccggcgcgcttcctcgactatctgcttgccagcattgcggaggccgatcccgccgccgcgcgcgaagcctcgcaagtcgtggccgccggacacgacgaggccgagatcgaactgtgggcgatcacgctggtgcagggcctggcccggcgccagcgcgaactggtgctgatgatcgacgacctgcaccatgtttccgaccccgctatcctgctggcgctgcagtggctgctggagtacgccccgccgcaactgcacgtggcgctggcctcgcgcacggcgctggacctgtcgatggagcgcctgcgtctgcagaaccagctcgcggaattcgacatgcgcgacctgcgcttctcgcccgaggaatccgcgcgctacctgcgcgaccagctcggcaacattccgggcagcgacgccgcggcgctgcatgaactgacggacggatgggtggccgggctgcaactgtttgccatcggcctgcgcacccggcaggccggcagctacccggtgacgcaggtgcgcgacgcccgggcgttcgccagcttcttcgagcgcgaagtgctggtccggctcgcgcccgacgatctcgacatgctgacccgggtggccatctgccagcgcttctgcgtgccgctgtgcgcggaaatcctcgggcagcccgacgctgtggcgggcatcaaggcgcgcgtgacgcggatggtggccgaccatctgttcatcaccgtggtcggcagccacgacaacgaaacctggtaccgcatccacccgctgctgcgcgaaacgctgctcggctacctggcggcccgcgacgaagcggagatacgcgcgctgcacgccacggcctggcgctggttcgacgcccgcggccacctcgacgaggctgtgctgcacgccgtgagcgcgggcgagccggacgccgccgcgaagctggtcgaagggcgcgcgcaggcgctgctcgtcggcggcgaactgagccaggtggcgggcctgctgcgcatgctgccgcaagagcaggtcaggcgcagcttccgcctgcacgtggcccacgcctacatgctgctctacgcgcgcgatttcgacagcctgcgccgcagcctcgacgagatggacgcgcagcgcgccagcgttggtacggtcgggtgctataccgtgtcgctgctgcgcgcgggcatggcgctgcaactcgacgatatcgacaccgcggcggcgctgctgccggaaatctggaacccgccgccggaggccggcgatttcacatggcttgcccgcgccaacgcgctgtcctggctgctgatccagcgcggcgagcacgatctggcgcgcgggattctggaagaggccgacctgcgcagccgctcgccgcgcagccgccagttcggccgctgcgtgcacgcgctgagcctggtgcgggaagggaagatccgccaggcctgcaagattgtgcgggaggtgctggcggaagccgaggggtatggcgcgggctacgtggcgatggcgagcatggccgccgggctgctggccgatgcgctgtacgagctgaacgaaaccgaggcggcctgccagcttctggagccgcgcatcggcatggtggagcgcacttcgttgccggaggtggtgctgcgggccagcctggtgctgtcgaattcgcactggatcgccgggcggcgccagcaggcactggcctgtctggaccggctggaggcctatgcggtgcgctatggcctggaccggctgctggccgaggcgctggtgcagcggttgcgccggcatctccagcagggcgcgatggagcgggccaatatcgtcctcgaatgcgtgcgggggcttgcgcaacgccatgccgcttcgggttcggattcgggccccgagcgggcccgcgcgctcgcccacgcggccgagcgcgcggcgatcgacatggccctgcacacccgcgattttgccggggcgctggagcgcatccagcccttgctcgatgccaccgcgcagggacccgccacggccagcctgcgcatgcagcttgccgtggcgcggcaggggctgggggagggggcggcggctcggcaggacttcgtgacggcctgccggctgggccacgggctgggtttgtcgcgcacgctgctggacgcgctggaggtcatgtcggacgcctccgacgctcttatccgcgagccgctgccggaccctgtgctcggcttctacgtgcagcgcctgctggcggcgcatcgcacggcggccagcgagcgcggcgccgccgatgccgggccgcagagcggccccatcgccctgctgagcgagcgcgagcgcgaaatcctgtacctgctggcgcaggcgatgtccaacaagaagatcgcgagagtcctgaatgtctccgccgagacggtcaaatggcatctcaagaacatctacgccaagctgggtgtcggcggccgcggcggcgccgccgcgctgctgcgcgacgtgatggggccgggcgtggtgccggcctgatcctgccgccttcctgccgctgtccacgcacgcccgcgtcatgcgggtaatgccgttcagtttcagctggtccaccgtcgtccccgcgaaagcggggacccagtggctttgaaagacgctgggttcccgctttcgcgggaatgacggtaagaccaggaatgctcaactgaacggcattaagcgtcatgcgggcgtgttgttgcgggcgcattgcggattgccggagtgctccgctagcgcgcctcatgcggcgggtggtggtggcgcgcggaccttacgcatgcttatccgcgcgccataagctccgctcctccccatgccacccgagtcggggagtacctgccccgggcccgccggccaatcatggacacacacctttcgttcaacccgatttactggagtgtccaagacatgagcctgcttgaagggaaagtcatcatcgtgaccggcgccggcgccggcgtgggcaaggggatcgcgctggaggcggcccgccagggtgcgcgcgtgatcgtcaacgacatcggcgtcaacatcgacggctcgggcggcagcgccagccccggcgaacaggtcgtcgcggaaatccgcgcggctggcggcgaggcggcggtcaacaccgacagcgtggccgactggggcgcggcgcagaagatcgcccagcaggccatggacctgtatggccgcatcgatggcgtggtcaacaacgccggcaacctgcgcgacgtcctcttccacaagatgagcgaagaagagttcgacgccgtgatcgcggtccacctcaagggcagctggaacgtctcgcgctcggtggcgccgcatttcaaggcgcaggagagcggcgcctttgtccacatgacctcgaccaccggcctgatcggcaacttcggccaggccaactatgcggcggccaagctcggcatcgtcgcgctgtcgaagtccatcgccatcgacatgcagaagttcaacgtgcgctccaactgcatcgcgccgttcgccttcacgcgcatggtcgacagcgtgcccgccaatacgccggaagcgctggaacgccgcaaggtcaacatgcgcctggaggccggcaagatcgcgccgttcacgctggccctgctggccgacgaagcgaagcacgtcaacgcccaggtcttcggcgtgcgcaacaacgaagtcttcctgttctcccagccgcggccgatccgctcggcccacaggagcgaaggctggaccgtgcagtcctgcgtggagcatgccatcccgatgctcaagagttcgttcgtcccgttcgagctgtcgcgcgacatcttcacctgggacccggtctgaccgcggatcacggcttcaaaggagcaatgcaatggatttcgagcccgatctcggactggaggcgttccgccaggaagtacggactttcctgcgcgagagcctgcctgccgacctggccggcaggccgcgcagcggcactcgctcttcgcgcgcggacctgactcgctggcagggcatcctgaaccagcgtggctggggcgcaccgtcctggccgaaagagcatggcggcaccggctggtcggtgctgcaacggctaatcttcgacgaggaatgcgtggccgccggcgccccgtcgccggacaccgccgcccagcgcctgctgggaccggtgctgaacgctttcggcacgccggcgcagcgcgccgagcatatcccgcacatgctgagcggcgagcgccagtggtgccagggcttctcggagccgggttccggctccgacctcgcctcgctgcgcacgcgcgcagtcagggatggcgaccactatgtggtcaacggccagaaaatctggaccacctgcgcccaccgcgccgactggatcttcctgctggtgcgcaccgatcccgaggcgaagaagcaggccggcatcaccttcctgctggtggacatgaagtcgcccggcatcacggtgcggccgatccgcagcatcgacggctgccaccacctgaacgagaccttcttcgaggatgtcagggtgccggtggccaaccgcgtgggcgaggaaggcgccgggtggagtatcaccaagttcctgctcaacaacgaacacgcgacggccgccgacctgccgatgctgcgccgctacctgacgcaggtgcgcaatctcgccgcgcgcaaggatgtcagcggccgcacgctggcgcagcggcacgagttttcgctgcggctggcgcgcttcgaggcggagctgaacgccatcgccatgctggtgcagcgcgtggcgtcgatggaggaagaccatagtcccgctgcccacgcgatgggctccatgctgaagatccgcggcacggaactgcagcaggccatgagcaccttcctggtggaagcgctgggcgactacggcgccgtggcgtacccgacgctggacgacgagggtggcaacggccatggcgacgaacgcgccgagctgcccatgcaggacctgggccgcggcatcgccagcgagatgttcttccggcgcgcctcgaccatctatggcggcaccagcgaagtccagcggaccatcatcgccaagtcgctgttcaatttctgaaggcagtcaccgagcatgaaattcaacctgaatgatgagcaaggcctgctgcgcgacagcgtgcggcgctttgtcgacaaggaatacgacctcgcggcgcgcacggcacgcctgcgcagcggcgagccgtgccatgccggccattggcgcaccttcgccgataacggctggctggccgcggcgctgccggaagcggcgggcggactgggcggcaatgtcatcgacatggcgctgatcagcgccgagttcggccgcggcctggtgatcgagccctggctcggcagcgccgtgctggcgccgcagacggtgctggcaggcggctctgcgctgcaacgcgaagcgctgctgcccgccgtggcggacggctcgcgccggctggcgctggcctacagcgaaagccagtcgcgcggcttcgccggcccggtcctgacgcgcgccatgccgacgcagggcggctacacactgcacggcaccaagacgctggtgctgggcggctgcgacgccgatgcgttcgtggtctcggccgatgtggccggtgtgggcaccagcctgttcgtggtgccggccggaaaggaaggcgtaaagcggcgcgcactgccgctgcatgacggcagctgggccgccgaagtgagcttcgacggcgtcttcgttccggccgacgcgctcctgggcgaggccggcaacggcgaggccgcgctgcgccagggcctggcgcatggcaccgccgcgctgtgcgccgaactggtgggcgccatggagaaggccatcgagatcacggcggagtacctgaaggtgcgcaagcagttcggcgtggcgatcggcagcttccagtcgctgcagcaccgggtgtcggacatggccgccgagatggaagtcgcccgctcgatgctttacgtgctgctggcagccatcgaaaacgacagccccgacctggaccgcaccgtgtcgcaggccaagagcctggtggtgcgcgccgcgcgctttgtgtgcggacaggccatccagctgcacggcggcattggcatgaccgaggaatatccagtcggccattacttcaagcgcgccgtcgtggcggacgcgctgttcggcaatgccgacatgcacgatgcgcgcaatgccgaggcatggcaggcatccctgactgaataggaagagcaagcatgaagacctacgagaacatcgccgatctccagccgctggttggagaagtcatcggcacgagcgaatggctggcgctggaccaggcccgcatcaatacgttcgccgacgccacgggcgaccaccagtggattcacgtcgacgtcgagcgcgcgaagaacggcccgttcggcgcgccgatcgcccacggtttcctgacgctgagcctgctgcctgcctttacgcactccgcgtaccggatccggaacagcagcacgggcgtcaactatggcctcgacaaggtgcggtttcccgccccggttccggtcgacagcctgctgcgtgcgcaattcaagctgatgtcgtacgaggcgctggagaacggcggcgcccagttcaaggtcgagatgatggtggagcggcagggcggcagcaagccggtgtgcatcgcggaatcgatcctgcggcgctttccctgatttccataaggcgccgcacgccgcgcggtgacgacgacgggcgggtctgctggcaggccgcccgtcttttgccattcaggcaccccggcagacagaccgcccccacggcagtgttgccgtctagccaaccaccgtcgttcccgcgcatacccgaagggcacgtgggcgggaacccagtgactttgatcccgaaggggacgtgaagacgctggattcccgcctgcgcgggaatgacggtagcgcttgatgccttaacaggactacgtcatccccatgcaggggactcaatagaaggaggagacaggcatgaccagaccccattcgacacgccgccgccacatcctggcgctggccgccagcagcgtcatccagacgctggcaccggccgcgcgggcgcaggcgcgcggctacccggaccgcccgctcaggatcgtgtccgtcgcgagcccgggatcgggcatcgacgactacacgcgcctgctggccaagttcctgggcgagaagctgggccagggcgtggtcgtggagaaccggcccggggccaacatgatcatcgccagcgactacgtggccaagtcagcgccggacggctatacgctgctgctgaccgcatcgagctcgatggcggcgaatcccttcctgttccgccagctgccgtacaaccccaacaaggacttcgtgccggtggcccggctgtcgacgttgcccatcgtgctggtggtgccggccgcatcgccatacaggaccgtggccgacctggtcaacgccgcgcgcgccaatccgggcaagctcaatggcgccagcagcagcaccggctaccggctgatggccgccgcgttcacgcaggcggcgggcatccggacgaccgacgtgccgtacaaggcgaccgccagcctgctgacggacctgatggggggcagcgtcgatttcaccatggtggagttcggggcggcgctggcgctgatccgctcgaacaagctgcgtgcgcttgccatgctgagtccgaagcggctgccgcagttgcccgacgtgccgacgctggcggaagccggcatgcgcaacggcacgctggtggagtcggtgtcgcgcatcaactggagcgggctgttcgcgcccgcgggcacaccggcgccgatcgtggagcggctcgggcggctgtcgctggagttcgtcaattcgccggaggcggcggcgcactacgccagccggggcagcctggcgaatcccggctcgggcccggaactgggcaaggcggtgctggacgaccagcaggtctggaaaacgctgatcgccgcggctggcgtgcagcccgagtagtgaattagttaaggtttctattcctgctgtcattcccgcgaaagcgggaacccagcgtctttcaaagccactgggtccccgctttcgcggggacgacggcggactaactgaaccgcattaacccgggggggcgccttattccacccgcgccccggacaggcggaccaggcgttccacaacgggagccgtggcctccacatcgcgcttgaaatccgccccggtggtgccgagcggctgcatgccgaacacctggaagcgggccttcatcgcggtggtctgcgcggcggcgcgcgccgcctgctccagctttgccagcaccggcgccggcacgttggcgggcgccaggatgccgccccagccgatggtcctgtactcggcgccgggaaagccggcctcggccatggtcggcacgtcgggcagctcggccagcttctggttgcccatgacggccagcgcgcgaagacggccgcttttcaggtgcggtgccagcgtaccggtggtgccgatgccccagtcgatctggccgccgatcaggtcctgcatcatcggcgcctcgcccttgtaggcggcgtgggtcatctccagcttgttggactcgctgaagtacgccgccatcaggtgcgccgacgagccgatgccgtacgagccataggtcacgctgcccttgtgctgctgcgcccaagacacaaattccctgaccgacttcaccggcaccttttgcgtattgaccgccatgacgagctggccgtcgcaaatctgcgagacgaaggtgaagtcgcgtttgacgtcatagggcacccttgcatacaggaacggcgccatgaggatcgggccggacgtggtgaccagcagcgtgtacccgtccggcgcggcgcgggccacgtactgggcaccgagcatgccgccggcgccgggccggttgtcgatgacgattggctggcccagttgcttgctcatcgtctccgccatggtgcgggcgatggagtccatcgcgccgcctgcggcgttgggcacgacgaatgtaatcggccggctgggataggtgtcggcccgcgcggtgatgccgcagaacagcatggccacaccggcgatcgctttccacttcatcgttgtctcctcttctgggtcttgtcatgaaggccgggcctggcccggaaagtcgcccggccggccccggtcccgtcgccgcgagtggccggccgggcggcaatcagttgatggcgttgaggccgaggatctcgcgcccgatgatcagcgtctggatctcggtggtgccttcgggaatcaggccgccgcgcgcgtcgcggaacaggcgctcgaccgggtagcccaccgcgcagcccatcgcgccatgcacctgcagcgcgaggtgggacacttcataggcgttatcggtcgcatacagcttggcgatcgagcattcgctgcgcgcgttgccgctctgcaaggcccgcgcggcgcggtagccgagcgcccgcgccgcctgcacgcgcgtggtcatgtcgacgatatgcttctgcacgagctggaacgaaccgatggggcgcccgaactgcttgcgctgggtggcgtagtcggtcgccaggtccagcgcatactgcgccgcgccgaccgcgcccatcgccacgttgagacggccgaaattcaggccgatcagcgtctggcgcaggccctggccttccttgcccagcaggttcgctgccggaatctcggcattttcgaaggtgaaggcggcggtgccggtggtgcgcgcgaacatcatctcgaccggcgtggcggtgtagggcgtggcgtcgcgctcgaccaggaacatcgacagatcgccgttgcaggtgtcgctgtaggtgcgcgccaccacgatgccgaagtcggcgaacatgccgttggtgatccacagcttgctgccgttgagcacgtaggtgtcgccgcgcttgtcggcgcgggtcttgatctcggccacgttcgagccgacatcgggctcggagatcgacacatagctcttgcgctcgttgcgcagcagcggccacaggaagcgctccttctgggcctcggtgccgtaggcctggatgatgcccgcgacgatgttcatcgaattgatgatggcgcgcagcgactgccagcagtagccggcttcctccatcatcaccgcccaggtcaggtaatccagccccagcccgccttcggattccggcatgtagccgccgaagtagccgaaatcggccaggccgggcagcacctcgtgggggaagcgccggttcttctccgcctcgtcgatgatcggggtgatcttgtccttcaggtagcggcggatgttatcgcgcagcaggcgctgggtgtcgtccaggccatcgatgtcaagggtggtgtcagccatgcggcctccgcaaataagaaagggtttggcgccatgttggcggcgcgcgggagaggccggcaaacggttttttggaggggcacggataagcgcggcatggcggataagtgcgcctgatcgcgcagggccggcactggcgcggcatgggcggcgtgccctggcgcaggctgcgctttgccgcccccccgaccccgcagcggtccggcgtcggcgatttccggaagtcgtcatatgcgccgcttgatgcgatatgcgcaacccccgccgggggggcgggggttgcgcgatcggcgggtatcttcaggcgtgtatcgaaccttgcgagagcgaacatgaagacacgtatcaccgagctgctgggcacccgctatccgatcgtcgagggtggcatgcaatggatcggccgcgcgaagctggcggcagcggtatccaatgccggggcgcttggcatgatcacggcgcgtacccagcgcacgcccgacgacctgcgccgcgagatcgaccgcacgcgcgaactgaccgacaagccgttcggcgtcaacctgacgctgtcgctgaccaacaccgacgtgacctacgacgactgggtggacgccatcgtcgccagcggcgtgcagatcgtcgagactgccggcaacaacccgaagccggtgatcacggcgttcaaggaggcgggcctgaaggtcatccacaagtgcacggcggtgcgccacgcgctgtcggccgagcgcatgggcgtggacgtgatctccatcgacagcttcgaggcggcaggccatatgggcgagggcgacgtcggcagcatggtcatgattcccgccaccgtgcaggccgtgaagatcccggtgatcgcctcgggcggcatctggggcggacgggccattgccgccgcgctggcgctgggtgccgatggcgtgaatatcggcacgcgcttcgcgctgacccaggaatgcgagtcgcacgacaacgtcaagcaagcgctgctcaagggcaatgagcactccacgatcctcctcaagcgcacgctgaagcgctcggcccgctacttcaggaacgaggcggcggagcaggtcctggcgatggaactgcgtcccggcggcgccacctacgacgacctcgcgccgctgctggccggcgagcgcgggcgcaaggtgctggagaccggagacgtcccgtccggcctgatcggcgccagccaggcgatcgcgatgatcgacgatatcccggcctgccaggaactggtctcgcgcatgatggccgagtgccgcactgcgctgtgcgagacgctggcgcggttcgacgactgacgattcaccaaggaggcaacccatgcaaagagagacgatccccttgcgcgaagcccggctcgaaatcggggacggcatcgcggagctcatccatgaccggccggaacgtcgcaacccgatgtcgctgacgctgcgccaggactacaccgacatgctggaccgcgtggagcgcgaccccgagatccgcgcgctcatcatcaccggttcgggcggctcgttctgcgcggggggcgacctcggcgacctgaagagccgtgtcgagcagcccgatgcgccgcagaattcgcccgacgcgatgcggcgtcgcctgctcgcgctgcatgaccgggtcgcgcggctgcgcaacctggaaatgcctgtcatcgccgcggtcgatgggccggcgctcggcgccggcatggggctggcgctggtggccgacttcgtgctggcgtcgccgcgcgcattcttcggcatgtcgtttgccaaggtggggctggtgccggacatggcttcggcctacttcctgccgcgcgtggtcggcatgtcgatggccaaggaactgatgctgacggcccgcaaggtcggtgccgaggaggcaaagcagctcggcatcgttcatgcgatctatccgcacgagacgctggccgagcaggcgcggcagttcgcgctgcgcttcgtcgacgcgcccccgcaggcgatgggcgcgatgaagcgcatgctgaacagcagcttcgagacgagctacggcgcgttcgtggagctggaggcgaatgcacaggcggtggcgtccaccacggcttaccatgccgacgccttgcgccgctttgccgagggcaagccgttgcggtatgactgggaccgggtggcgaaggggtgacagcttgccgcctgttgcggtaatgacaaggccagcgcctgggcgttggccattttgcatttcggacgttgcaaagaacggcttgccaccgattgcttgctgttatacgtcattgacgtatagtggtcgcatgtacacggtgatcgaaacggaagtcttccagcgctacgctgacggaatctggtgcgacgatgagcgccccaggccttcattagctgactggccaacaacgccgaggccgcagacgtgacgggtggtcgcgcgcaggcatgggcaagcgcggcggcgcacggctgatctactacaacatcctcgacgacgggcaaatctggttgctcatcgcctacaccaaggcaaagttcgacaaactcccgacggcgttcctcaaccaactgcgacaaggagtcgaagatggccactgataaggaaattgaccaattccaggctgacctgctgaagtcggtcaagcaaatgaaagccggccaggccgcccgcgtcacgaaggtcgaagtctcgcccgtcgcgcacgcgcgcaagctttcgggcctgtcgcagagccagttcggcgacctgatgggcgtttctgtgcgtaccctccaggagtgggagcaaggccgccggcaacccacaggcgcagcgcagaccctgctgcgcgtggtgacgatgcatcccgaggtgctgcgtgagttgcataaggcttagcgcgtcatcggggcgcgaaatcggcgctgaaccaggcaaaatggccgggcgcatgcccggccattttgcattcactgccaacgcatccggcgcttatgcaccttccccccggatctcgataaccgcgtcggccgcatacgcgccttcaccggccggcatggcgaagaccggattcaggtccaccgactgcaggcgcggaccggcggccgcggcgaatgccgagagccgggacagcgtgcgggccagcgcgggaatatcggccacgggccgcccgcgcgcgccgagcagcagcggcgcacccttgatcgagcggatcatctgctcggccacgtcttcgccgaacgggcagcggtggaacaccacatccttcagcacttcgacgaacacgccgccgagaccgaacatggcgatggggccgaagaccggatcgcggttgatgcccatgatgcattccacgccgcccgacagttgcttggccaccagcacgccttcgatgcgcgcgtcgggcgccgcctggcgcgcgcgttcgagcaaggtgtcgaaacccgcgcgcacggcggcttcgtcgcgcacgtcgagcagcacgccgccgatctcggacttgtgcaggatgtcgggcgacaggatcttcatgaccaccgggaagccgatctcgcgtgcggcaagtaccgcggcatcgcccgtcgcgcagctccgttccggcgcgctggcaatgcctgcctcggccagcagcgccttggcctgtgcctcggtcggcgtctgcgcgggcagcgtcaccgcaggcacggacggcgccggcgcggcaggcgcggcggcgaaggcgcggccgaagcggcccatggcggcgatggcggcgacggcgcggctcgggtcctcgaacacggtgaagccggcggcttcgtattcgcggatcgcctcgcgcgcgccgcgcgtcaccagcacgtagagccggtcggggaagcgctcgcgcgcacgcgtgagctgttcgcgcagcatcggcgcgacggcgggcatggtcgcaacatagctgaagaaggcgacgatcgatcgatagccgccttcgtcgagcatcatctccaggaagggccgcaccagcgtcggatcgttgaggaactggcccgtggtatcgaccgggttgcgcggcgagcagatcggcaggcgctccagcatgcgggcctgcgcggcggcgggcatttccggcatgggcaggccgtattcctcggccgcgtcggagatgatgacgcccgcgccgccgctgagggtcaccacgcccagcgtattctcggccgggaagatgccgcgcccggccaggcgcacgatgtcaagcatctgctcggtggtgttggcgcgcaccacgccgagttcttccagcaccgcgtccaccacggcatcgttgcccgcgatcgacgccgtgtgcgattgcgccgcggcgctgccgacctcgctgcggccgaccttcatcatcaccaccggcttgcgcgccgcgcgggcggccttgagcgcgtcggcgaggccgtcgccgtcatggatgccttcggagtacagcgcgatcacgccggtattcggatcgtccaccatcaggcgcacgacgtcggccagcgacacatcggcttcgttgccggtcatgacgacgccggacaggcccacgcccgcgtccaccagggacgacacgagatggctgccgtacgcgcccgactggctgatgacggcgacgttgccggggaacacgccgtcaaggcgggccagcgtggtgaagctgccgacgaagcccgtgtgcaggttcacgcagccgagcgagttcggaccgagcaggcgcgtgccgccgcgccgcgcgatggccaccagttcgtcctgcatggcgacgcccgcgccgccgacttcggcgaagccggcgctgaacaggatggcaaccggcacgcggcgctccgcgagctgctcgatcacgccccgcacctgctcggcgggaaccgcgacgacggcaacgtccggcacttcgggcaggtcggcaacggtaggccaggcttcgagtccctgcacttcgcggcgattcgggttgaccggcatgatgcgcccggcatagccggttgccagcatggtggagatcggcttgccgccgatgcggtcagggtcgttcgacgcgccgatgatggcgaccgagcgcggattgagcaggcaggatagagagttcttggtagtcatgaatcacccgtcggagggggagggcggcgcggtgcgcgccgccttcgggatcaggccagcgtgaaggtcggcaccggcgcgccgccttcggacggcgcgaagcgcagtaccactttctggccgatgcgcacggtgtcgagatcgcaatcgacgatatggctcatgaccgttacgccttcgtcgagcttgacgtaggcgatgcagtacggcgtggggccggcacggcgcgtgacgctgaacgagtagatcgtgccgcgcccgctcgcttccttccagtgcgtgctgcccatgcagaacgggcacagcgggcgcggataccagtgcggcttgccgcagctgtcgcaatgcttgaccagcaggcggccctcgcgggcggcggcccagaattctgcgttgtcggggtgctcgatgggcgggttgtacgggatgggggtgtggggagtcgtcatggcgatgtccgaatgcgggccgacgcggcgccggcgttattcacgttccaggatgagggtggcgctgccgtggcgggcgcccagcaggccgccggtgccgtgggcgagcgccaggcggcagtcgggtacctgcaccgccgggtgggcctcgccacgcagctggcgcacggcctcgatgaccttggtgatgccgccgcggttggccgggtggttgttgcacaggccgccgccatcggtgttgaacgggagcttgcccacgccggagatcaggttgccgtccatcacgaacttgccgccttcgcctttcttgcagaagcccagatcttcgagttgcagcagcacggtgatcgtgaagctgtcgtagatcgatgcgtactggatgtcggcgggcgtgacgccggcctcggcgaaggccgcggcgccggagaagcgtgcgcccgaccaggtcaggtcgacttcgccgccaagctggcccttcacgtactcgccggcgccgaggatcttcaccttggggcgcttgagcttcgcggcgatctccgggcgcgcgacgatcagcgcgccgccgccatccgacaccacgcagcagtccagcttgcgcagcgggtccgagatcatgggcgagttcagcacgtcctccaccgtcaccacgtcgcgcagcatggcgttcgggttgtgctgcgcgtggtgcgatgccgccaccttgatccacgcgagctgttcgggcgtggtgccgtactcgtacatgtggcgcatggcgaccatcgcgtagttgttgacggtcacctggccgaacgggctttcgaagggcaggtcgggggtgttgtcgccccagttgcgcgccttggtgccgctggagccttccgagcgcggacggccggcgagcgtgatcagcgccacgttgcacttgcccatggcgatggcctgcgcggcatgcgatacatgggccaggtaggacgagccgccggtttcggtcgagtcgacatggcgcacattcaggcccatgtagtcgatcatgttgatcacgccgaggccgggagcatcgccggcgcagaagtagccgtcgacatcggccagcgtcagcccggcgtcttccagtgcgcccttggcgctttccgcgtggagctgcgccacggtcttgtcgggtgccttgcgggtggggtgctcgtaggcgcctacgatgtatgccttgcctttgatgctcatgcttgcttcctgtgtgtggacaaagggttgggggttccggcgggcggatggccttccggcagtgtgttgcgctaacggctgtctgcgctggccgggttcggctccgtttgcacgtccggggcgccgcggcgatgcggcggccacagcagcttcacgacctcgccgtcctcgcggtaggtgtggcaggtgttcagtgccgcgggctgcggcagcggcgcggtgccgtcggcatgccagcggccgccgcgctcgcggcggtcgaccgcgaaaatggtctgccgggccgtggtggccagcggtccgagcagttcggtgaggtgggtgcagccgcgcacaccaccgacgatggcgctggcctggcggcgaaagcctgcccggatctgcaagcccttcaggccggcataggcggacgcgatgtcggcgcactggctggtcgggccggcggacagcgttgcgccgatgtcatggatcaccaggtcgcggctcaccgtgatcacgatgcgcatgtgatggatagcttcgcccgggcccaggcgcttgaacagcaggtgcgtgccggttggcgtgatgtccgtcatctcggcctcgatgtcgaacaggccgtcggcgcgctcgtagccgttgcaggtcacgtggcgcgtatggatgcgattgcggtcgggaagggtcggcttcatgggggctcgtcgcggggctcaggcagcgtatcgccaggactcgttgccggcatggaaaggagaggggcgccgcaatccctgcatgcggcggtgcgcggcccagaacagcacgcgcaaagggaggtcgaggctgccgctggcgtcgtggcattgcacggcatccggttcgaccgccacgccaagctcggctgccgacgcatatcccaccacgctcacgcgggcgtcgccgtgctgcaggcattcgccgagcaaggcacgcagggcttccgggtaggacggtgcgccggggcggctcgagcttgccagcgcccgctgttgcagctggcggctggcctgcctgacttcctgcaggaggtccatcatgcgctctcgcggcgcggtggcgtgggcaggctggtgccctgcgcggggccgtggtggtagcggcgtggtgcaaacgtatgctgacatcggaatgtgcgggtgatgcgccggccacgatggcggcgcggagcctgcgaagcagtgtgaagccggcagccgtccggcatccccactcgacgagggggggcgagtgcgcccggtacgccgcacgacgccttaagtccgccttgcagtgaaacagccccgcgctccaggtgacagaaacgggcccattcaactgcccgtccgccgcaggccatatgcgccgcgatgcgccacccgcgtcggggagtgcctggcgccatggcagcggcaatcatgcttccagtactgccttcctgttaccgcatgcctacgaccaacccgcatcttcattacgttccagccggcgtcacgcttcccgtggcggcgcatgaaggtgatccctttcgaagcctgaaggtcatggccgaggcgaatccggacgccgtcgtggccaccgacgaggccggcggaccgctgacctgcgcgcagttgctgaatgcgagcctcatgctggcgggatacatgcagcagcgcctggatgtccgcggcggcgagcgtgtgttgctgatgctgccggcatatcccccgctggcaattggctggtatgccgcgctgcgctgcgatgctggcgtggtctcgctggacccttgcagctccgctggggaagtggcggtatgcctgagcgagtccggggcacgcgtggccattgtcctggcggacgcgctggccagcgtgaatcccatgctggagaacggacggctgcgcgcctgcattgccgcggcgccgcccgcttcagactggcgccgctcgggcggcgcgggacagcatccacgggtgcatgcattcggcgatgccctggcggcgggcatcgaggcgatgccggcgcggggctcgggcaatgcgcccgcctccccgcgtggcgcccgtacgccgcacaacttcctccgctaacgacactgcgccgcagtcgcccctgtttctgtcgatgcgccgcggcggattgcccggtccggcgcatcgagtctccaccccctgcggtctgctcgggcccagcgggacttatcgctccggccacccggcgggagcgttctttttttcaaaccacccgatccggaatgctgcgcccggcgcattgagcgtgcacgattgcgatacgcgcggggtcatgtgcaacggctgccgacgggcgccgatatgttgcgcttgcgcgccgtgacctgtccggtcgcgtcataagcgctggtgtcggtgcgcctcactggtcgcccacgttatccttgccgtcgtcggcgtggcgcttaatacccgttttccggcgcaggcatggacctatcatctcccccccccagagacgagggggcaggcggggtggcacaccccctcccgtctgggaggtggatcggcggcagacagtggtctccttgccggtgcgcacacagggattcgaagtgcgccgcgtacccggcggtccggggccagagacggtggcctccgccattcaaccggggcgcaggggatccacatggagaagacgagctatgaagaaaacaaaattggccctggcggtatggggagcgcttgccgggttcaatgctgccgcgcaaacgagcagcgtgacgctgtacggtgtgatcgacgtgccgatcgagtatgtaaaccgggtcgccacggcgcagccgaccgtggtgaacgggcagccggtgttcgctaacaccggcggctcgcgcgtgtcgatgctgccgctgggcggcagggcgccgtcgcgctggggactgcgcggcgtggaggacctggggggcggaaacagcgccatcttcgtgctggaaagcggcttcacggctgattcgggcgccatgacatcgggcaggctgttcggccgccagtcctatgtcggcctgcagagcaagacctacggcaagctgatgttcggccgccagtacacctctcttttcgaggggctgtcgaacttcacgcccacgcggtatgcgtcgacgtatgaccccgtcgcctggcagctcggcatcaactatcgcgaggacaacacgatcaaatacctgggcacgttcggcccggtaacggtggcggcgcactactcgtttggcgttggcgtgccgctgattggcgccacgccgctcgcaggcggcggtgccggcgagacgccgggggcgttccgcgacaacaacggctatggcgcggcggtgacatacctgaacggcaccttcggcgcgacgctggcgtatgacgaatggcatcccgcggtcacgtcgggccagcaaggcgtcgcccgcaagcttggcaccgccgtcagctatgccgctggcccgttcaaggccatgctgggctatcgctgggctaagaccgacttcgccaatggcaacacgctggcgcgcgacgactattactgggctggcatcaattatgacattacccgggcactcgagctgacgctagcctactactacgccgacttcaaatccctgcgcctggggccgaccgcgccgagccttgctcccgcgaacccgtggcagacgacgcttattctcgactaccgcctctcgaagcgtaccgacgtctacttggccacggcctacgcacgcaacgcgggcctgaacttcgactccacacagaccgcgttcctgttcaactatccgtcgatggccggacagaagggcatgttcggcgtttccaccggcattcgtcacaccttctgatccgcagacggttcgtagcaagggcgggttgctgcccgcagccgcccgccactaccggtgccgcgacatccgctctgtgcgggtgcgcgcgcggtgccggcgagcaattaacccaggagtacgcgttgcaaaccacctatgactatatcgtgattggcgccgggtctgcgggctgcgccgtcgcaggccgcctggctgacgcccgtgccggcaccgttgcggtgcttgaggcgggtgggcatgactgccgcccggccattacggtcccaatcggatttgcgtcgacggtgccgaagcccggcccgttcaactacggcttcacgaccgagccgcagcgtgcgctcggggggcggcgcggctaccagccgcggggccgggtgctgggtggaagctcgtcgattaacggtatgatctatatccgcggaacgccgtccgactacgacggttgggcggccgcaggttgcgaagggtgggggtggagcgatgtcctgccgtacttcaaacgggcggaatgcaatgaacgcctgggcggcggtaccgaagacgactggcacggcgggagtggtccgctgcatgtggtcgatacccgctcgctcaatccattcgaccggcgattcgtcgaggcagcgcaggccgccggctaccggtacaaccacgattttaacggcgcgcagcaggaaggcatcggcttttaccagcgcacccaacgcgacggcgagcgctggaacacggcgcgcgcctatctgcatggcggcgatgcctcgtcgctcaatggcggccgcccgaacctcgatgtgctgacggacacacaggtcctgcgtatcgtgttcgagaacaagcgagcgaccggcgttgcagtggtgcgcggcggggtcgagcaagtgcttcgcgcgcgccgcgagatcatcctcaccgccggcgcattcggctcgccgcaactgttgatggcctccggcatcggtccggcgggccatctgcgcgacatgggtatcgacgttatccatgacgccccggaagtcgggcagaacctgcaggaacacccagacatgaaactcgggcaccggctggtcagcgccgacctgtacgcctttacgctacgcggggcgctgcgtctggcaagcgagtggcgacgctaccggaagcagcgcttcggcatgtttgcttccaatatcgccgagtgcggcggcttcctgaagagccgtccggacctcgccgatcccgacctgcagctgcacttcaccgcgacgctgggagatccgaacgcgcgcaacgtccacggctactgcctgcatgtgtgcgtgcttcgcccccgcagccgcggggaggtcctgctggccagcccggacgcgcgccaggcaccgaagatcgaccagaacctgctggcagatgcgtacgacatggagaccctgctggcgggcacgaagatcatccatcgcattctcggccaggagccgcttgcgcggcttggcggaaagccccacaagtatggacatttgcgcttcgatggcagcgacgatgaagcggtacgcgaactgatccgcgagcgcgccgacgttgtcttccatcctgtcggcacttgccgaatggggagcgacagcggatccgtggtcgacccgcaactgcgcgtgcgcggcgtcgaaggactgcgcgtggccgacgcctcggtcatgccggccctcatcggtggcaacaccaacgcgcccgcgatcatgattggcgaaaaggcggccgaccttgtgcgcggcatcgcgcgcgcgggcggcgacgcgatagtcgacggccacgcacccgggcgtgcaccggtgacggaagccggcgcagccagtacggcttgggcaaaagctgacgtttcccgggctgcggcgccctccatcagcaaagcgatgctggcgagcgccctggtggcggcgctgtcctcgggcgctcacgccgtcactgcgccggacccggccaagcccgcgagcgccacgaccgccgccagcaacgccgcggtgcaccagcaactgccgttcacggaccgcgccgactacgaggcggtcgagcgcgggctggtcgcgccgtttcgcggggaagtccgcgacgcgtccggccgagtgatctggaatccggcagactacgacttcctgcgtgccgaggccgcgccggacacggtcaatcccagcctctggcgcatggcgcagctcaacgcgcacgccggactgttccgggtcaccgacggggtctaccaagtgcgcggcatggacctcgccaacatgtcgatcatcgaaggccggaccggcgtgatcgtggtcgatccgctgacccgatcggaaaccgcgcgggcggcgctggaactgtactacgccaaccggccgcgcaagccggtggtcgccgtcatctacagccacagccacgtggaccacttcggaggggtacggggcgtggtcgacgaggcggacgtcaaggcgggcaaggtcgcgatcctggcgccggcgggcttcatgcaggaggcggcaagcgaaaacgtctttgccgggacggccatgttccgtcgcgccatctaccagggaggatacggcgtggtgcgcggcgcccggggccaggtcgataccgggatcggcaagggcgtgccgctgggcggcactacaggcctcattccacccacggtgcagatcgttaaaccctacgaggcgcggcacatcgatggtgtggcatttgagtttcagttgacgcccggcactgaagcgcccgccgaaatgaacttctacctgcccggcaagcgcgcgctgtgcatggcggagaacgcgacacggacgatgcacaacattctgacgccgcgcggcgcgctggtgcgcgatccgaaggcgtggggcaggttcctggacgcgagcctggtcaggtatggcgatcgcgccgacgtgctgttcgctcaacacaactggccgacctggggcggcgagaacatccgcacgatgctggccgacgagcgcgacatgtacaccttcctcaacgaccgcacgctgcacctgatcaaccagggcatgacgccgctggagattgccgacaccatgaaaaagttgcccggcaagctggatcagacgtggtacacgcgcggctactacggctcgctcagcttcaacgcgcgggccgtgtaccagcgctacatgggcttctatgacggcaacccggccaacctcgacccgctgccgccggtcgagtccggcaagcgctacgtgcaagccatgggcgggtccggccacgtgctggacctgatgcgcgatgccatggcgaagggcgatttccgctgggcggcgcagctcggcaacaaccttgtgttcgccgaacccggcaataccgcggcccgccaggcgcaggcagatacgctggaacagcttgcctaccagagcgagaattcgctctggcgcaatatgtacctgagcggcgccaaggagctgcgcggcggcgtgccgacgctgggctccgttcgcaacgccgccgacctcgtcagggcgatggaaccgtccatgttcttcgactacatgggcgtgcgcctggattcggacaaggcccagggacacgacatgacgctgaactgggtgttcaccgatctgggcaagcctttcgcgctgacgctgcgcaacggcgtgctgacataccgcgagaacagccgccatgccagggccgatgccaccgtgaccatgaccaaggcgacgctggacggcatcggcctgcgcgaactggacttgcctcaggcggtacgcgagggcaaggtgaaggtggagggcgacgcgggcaagctgacgcagctcataggcatgctggccacgttcgatccgtcgtttggcatcgtggcaccgctggcaacgcagtagggggcgagcggtggcacgccggggccgcacaaggcggctccggcgccgcttattctttgtccaggaccgtgtcgcgcacttccagcaaggcggccacgtaggcatcacggttcttcttgacccgttcggtggggccggccagcgccacgcctgccggcgtgccggccagccacccggtcgcggcgagcccgtagacgccgtcgctgccttcctcgcgtgagtcgtaccagccgcgctgccgcatcttcgcgatttcggccatgagcttgtcgggatcaaccaccgtgcgttcggtcaggcgacgcatgcccgactttgccagcattgcccgcgcctcttccgggggcagcaggccgagcaatgctttcccggtcgcggaggcgtggagggcggcatgcgagcccacttcgacgatgtagcgcagcggttcgcggctgggctgcacggccaccacccggacgtgctgcccctccagtacgctgaagtaggcgctctcgttagtcagggccgcgagccgctcgacggcttcgcgcgccacgacaccgagcggatcgttctccgcgatctgcctcacgatctccagcaggcggccggtggggtagaagcggcggttgcgcgcggtgcgcgtgaggtagcccagcgaatgcagggtgtggagcaggtcggaggtgctggtttcgggcaattgcagcagccgggccaggtccgagttggacaattcgcgcttctcacgcgcgaagacttcgaagaccgccatggcgcgggcggccgacgggatcagcgtgggcatatggacaagtgagggagtggctcgaaaattggggcaactatacgagatttcggaggctatcgaaagcctgccgtccggaggcgcttgcgcggtggcacattgcggcgtgcagtcgttcgcaagcccggaagatcaccggctgggactcccggaactcaacaagcgatacctgcagaccggcccggggcggtatgccggccatcttcagcaggtcaggccggacgccgatttgctggtctaccgggaacgccttgacgtcccgatcctcagggagggctggacgaggaagggcttgcgcatgttcgccattgcgctgccggtggagagccgcgccacgttccatgggcgtgcggtcggcgccgccgtcgcccacctcgccggtggccgtgagtactcggtccagtctcccggaccgagcgaacacctcgggatcgtactcgcggacagcacattctctatccatgccgactacctcggcggcgttccccgtctcgcctggaccggcgagccgctgctggaagctcctgccgccgcccgggagcgtcttgcctcgcgcatcctgtgctgcctgctcggcgcgacgaaaaacgtgagcgccctggtttgcccggcggcgcgcatgaccctgcgcgacgatgtgctcgaacacctgttctgcctgctgatcgacgcggagctgccgggccggcgccgcgacattacccggctgacctacagcgatatcgtccaccggagccgggagcatctgcgggcgaatgcggaccggccggtcggggtgctcgaactgtccgggctgttgcgggtgagccggcgcacgatccagacggccttcatggaggtgaccggcgtcacgccgcaaacctatttgcgggcgatacggctgtcgtcggtgcgccggttgctgcggcaaaccagtgccgatcggctgaccgtcagccaggcggcagcccgctggggttttgtccacatgagccggttcgccgccgagtatggccggatgttcgggtgcctgccgtcggaagccccgcgcgcgtaggcgttggcgctgtccccggatgcgcgcgggcgcggcgaaaaagagggtggcgcgccgcatcccgtgcagcggcgccggctctctctgctcagaggacgttgcgcggatcctgctcgagtacaagcgtccagatcttctgtccgaccggtgcctgccgttcttccaggatgtgcgcaagcaggccggccgagcggccgaccaaggcgaggccgcgcgccatgaccgggtccagtcccatgtcggcgacgatggagccaatggcacccaccgcattgaggggcagcttcttgccgaactccttgtcgaagacgtcggcgatcgcctccatcacgcgccagtgcacgccgtagcagccgttggcgaccgacagcgcacgcaaggtgggcacgcgcgggtcgccgtcgacgtggatggggtggccgaccccgtagatggcacgccgttcctgcttgtgccgccggatgaccgcgcgcgccacgtcgcggacctgaccatcgtccgcgtcctggtccaggtcgcgcgcggcctccagcagcatttcggccgagttctgcatcgtgccgagcagcacgcttcccgcgccgagcaggccggccgcgacggccgcgacggccgcctgcatggcctcgggggctcccgtgtaggtcatgcgggtcgagaccgagcttggcgtcaggccatgatcggcggcggtcacgagcagcgcgttgaccatggtcttctcctgtgggctcggcgaccgtgcgagcgtgaggaggaagatcatgtcgacgaagtcgaacttgccgatgatctccgtggagaggttgaggttgcgtacgacaatggtgtcgcgcgtggtgtagccgatgtcggtcgttatcatgggatgggcttcctttccggataaagggtggtgtggcagaaacggtggcgttctggccgatgctcatgaccccgggtgagaggtgcggcggcgtcgcatcagataggtggtttccatttcggcgcatacttcgccgcgctggttgacggccttgcgcaggaaaccggtcaggccacgctccggcttgcttgtgggcctctgctcgacgacttcgacctcgacgcggatggtgtcgccgatatgggtggcgcgcgggaaacggatgcggttctcgagcacgccaaacagcgcgtcttccatgagctggttcgggatagcccgcgaggtcagtccggccatgaacgaggcgaccagcatgccgtgggcgatgcgctggccgtgcaccgaagtgccggcgtattcggcgtcgacgtgcaggcggttcatgtcgccggtcagcgcggcgaatgcggcgacgtcggcttcggtgatggtgcgcgaggacgtcgtgtacttcgttccgaccgtcaggtcgtcccagcagaggctgaggcgctggagtgattcgaaggtgagcaggggctgagtcgtcatcgcggttctccgaggttcagtggttgaaagccgttgcaggtgcgctcagccatatcggcccccggtgacgaacagcgtggtccccgtgatgtagcgggcatgctcggatgccatgaacgctacggccgcagcgatgtcgccgggctggccgacgccgggcacctggatgcgcgccaccgcgttctgcagcacggtctcgtagttgggcaggctcttgatgcagtcggtttcgatgaagccgggtgcgatcgcattcacggtgatgccatgcctggcctgttcctgcgagagcgcccgggtgaagccgacgaggcccgccttggcgctcgaatagttggtctgtccggggttgccgaacagcggcgcgaggcgatgttcacgatgcgtccccagccgttctcctgcatcggcggcagcgccgcgcggcagcagtggaaggcgcccttgaggacgacgtcgatcacgatgtcccagtcgctctcgtccatcttcagcagggtgcggtctttcacgagaccggcattgttcacaagtacgtcgagacggccgaacgcttcacgggctgcgccggtcatctggcgcacctgttccgcgtcccgcacgtcgcagcgcaagcccatcgcgcgcgcgccgccggcttcgatcgatgccgcgagtccggcggcggcgtcggcatcgaggtcggcgatgaccacggccatcccctcggcggcgagcatgcgcgccgtctcggcgccgatgccgcgcgccgacccggtcacgatggcgacacggtccttcaatcccagatccattgaatctccttccgttgtagtcaatgcgtggttaatccattagctcagtgtcttgcgccgttcccgcggccgtggcgcagcgcgatccggccgcgatgctttcggcgcggggaatggttcgtgcgtgagcagtacgtcgcgcacttcgagcagcacggccaggtaggcgtcgtggttctcttccatgcgttcggtaggtcccgccaccgacaggccgacgacgcggccgctcagacagcccgagaccgcgagggcgcacacacccaccccgctttcaccgcgggtctggtaccagccgcgctcgcggcccaggtcgatattggcgacgacggcgtcgacggtgtcgagcgttctcggcgtgacccgcttgagattcaactggctgacgtcggccagcatgtcttcgcgcggcatgaacccgagcaaggccttgccaaaagcggatgaatggaggccgtagcgctctcccacttcggccgtgtagcgcagtgcatgccggctcggcaccgtggcgacgatcctggcgaccgagcgttcgcggatgccgagataggtggtttcgccggtctttcgcgcaacttcctcgacggtttcctgcgcggctgccgtgagcggatcgttcgaactgatctggcgtgccgcctcgaacaggcggccagtgggatagaagcgccgcgtcagcggcgtgcgcatcaggtagcccagcatgtgcagtgtgtgcaggaggtccgaactgctgctctccggtaccgacagtaggcgggccatgtccgagttggacagctcgcgccgttctttcgcgaagagttcgaagacggccatggtgcgctggacgacgggactgaggaagggcatttgcgatgtccgaaaaaatcccgatggctggaaaattcttgaagacgaattgctacggtatgtcgtagtattgctctacaactcgtagcaatgcaactgggaaatttcgccggcctgtcgggctggcgacgccgcgaagccacaccaacacacccaaaggagactcttcgcatggaacttcggaccatcacgcgcacgctggcgccacgccttcgccggatcggcgcgacctgtgtggcggcagcggtggctgcgagcgatgcgctcgcgcagcccgcttatcccgccaggccagtcacgatcgtctccgtcggaccggccggcggggtcacggatcaggccgcgcggctgatcgccaccaaggtcggtgcgcgccttgggcaaaccgtgatcgtcgatgaccgaggcggcgcgggcggaaatatcggcgcggagtacgcctcgaaagcagcgccggacggctacacgctgatggtcggcacgcagggcacccagtcgaccaaccagttcctcttcaaatcgttgcgcttcaatcccgagaaagatttcgtgccggtgcacgggatcatttcgctgcccaacgtgctggtggtcaatgccagtcgtccatatcggtcggtgggtgaatttgtcgcctatgccaggacgcatcccggcaaggtgacggcggcatccggaggcaacgggaccggaatgcaccttgccatcgagcagttccggagcgtggccggcgtagacctggtgcatgtgccgtacaagggcagtccgcccgcgatcaccgatctcgtaagcgggcaggtggacctgtgcttcgactatccggcgaccaccgtcggccacatccggagcggcaagctgcgcgcgctcgccgtgctggggccgaaccggctgccgcagttgccgcaggttcccacgattgccgaggccggattcccgcgcgccgaatccaccgactggatcggcctgttcgcggtggccgggacgccgcagccgattgtcgaccggtggaccagggaggtggcgctcgtcctgcaggggcctgatgtcatcgcgtccttcgagcgcatgggcggcgtgccgctgccgctgggcggcgagcagttcggcagcttcatcgtctccgagcgggtcaaatggaaggcggtgatcgaacgcaccggcgcacggatcgaataacgcatcaccacgaggagatcaccatgtacgaagctatccagtacgagaacgaagatggcgtgggcgtgctcacgctggagcgcccgcaaaccaagaatgccgtggacgccgtcatgcgccgcgaactgccacagttgatgggcgccctgaacaccgaccgcacgctcaaggtactcatcgtcactggcgccggcggcaatttctgttcgggtggcgacctgcgcgcggtgcgcgacagcgcgggcagcgaaggctcggcggaggggcgccgccagcgcatcctggacgggcaggctacccccggcgcgttcctgaatttcgaccgccctgtcatcgcggtggtggagggcgttgcctatggggctggctgctcgctggcactgaccgctgacatggtcctcgccgcgcgcgacgcgcgcttttgcctgtcgttcggcaggatcggcgcggtgccggactacggcgccttctatacgctgccgcgcatcgtcggattgcaacgggcgaaggaactcgttttctccgcgcgcgaattcggggcggccgaggcacgcgatctcggcatcgtgatggaggtgcacgagcccggtaccgtgctcgaccgggcgcgggagattgcccgcagcatggcgcaagcgtcgcccctcgcgctcagcgtatccaagcgcgcgttgaatacctctctccattccgatctgccgaccatgctgatgcacgaagcagacgggcagggtattgcgatgagcaccgactatcacctgacggcagtcaggcgattcctggacaaggagccgccgctgttctcgtggccgcgccggcgcgactgaacctcgaccagccaatccacaaccaggaggaaacatgaacgactggacccagttgaagttgtccgtggatcgccacatcgcggtcgttacgatggatgcgccgcccgtcaatgcgctgacgcgcgggctcaacgacgagctcgttgccgtgctcgaccagctttccgacacacccgaggtacgcgtcattgtcctgacaggcgcaggcaaggtgttctgcgccggcgcggacatcaagggccgtggcgcgctggtcgatggccccggcgccctgcgcgcccattcgcgccgcacacgggagtgcttccatgcgatccgtgaatgtgccaagcccgtggtggcggcgctcaatggccccgcgctgggcgcgggactggccattgccgcttccgcagacatcctcgtggccagcgagcaggccagcgcgggtttgccggaaatcgacgtcggggcgcttggcggcggccggcatgccatgcgcctgttcgggcattcgcgcgtgcgccgcatgatgctgaccggctatcgcgttcccgcgcccgagctgtatcgcctcggcatcgtcgaagcgtgcgtggcgcccgatgcactgatgccggcagcgctggagctggcggaacaggtcgcctccaagagtccggtggtgtcccagcttgccaagcacaccctcaatacgatcgagcacatgggcttgcgcgacggctatcgctacgaacaggaccagaccgccatcctctcgaagacggaagactgcagggaggcacaggcggcattccgcgagaagcgggcgccggtcttcgtcggccgctgagggtgcttcgggcacggccgtgtaacaacttcccgcctgcgtgttgccgattctgtcaaatgcgggcaggtgcccgcccatatagtgatgacgcacaggtccccgcctggaaccaacgaggaatacgcatggagacgcttgagaagttctacattgccggcggatgggtggcgccgtcgcccggctcgaccctggcagaaatcgtcaacccggcgagcgaagcggtgatcggcacgctcgcaatgggcacggcggcagacgtggatcgcgccgtcgccgccgcgcgcgccgcgttccccgcttggtcggagtcgggtcgcgaagaccgcattgcgctgcttgagcgcatcattacccgctatcaagagcggctcgacgacatggcccgggcggtgcggctggaaatgggcgcgcccgccacgctggcgcgcaacgtacacgccatggcgggcctgggacagttgcacgcgacgctggcggcgctgaggaccttcgaattcgaaactgcgcggggcaagggcgtcatacggcgcgaggcgatcggcgtggccgcgctggtgacgccctggaactggccgctgaaccagatcgtggcgaaggtggcgccggccattgcggcgggctgcgccgtggtgctgaagccatccgagattgccccgctcgatgcgcgtatcttcgcggagatcatgcacgacgccggcacgccgcccggcgtgttcaacatgctctccgggacagggcagaccgtgggaacagcgttgtcgtcccatcccgacgtggatgtggtctcgttcaccggctcgacgcgcgccggcatccaggtggccatcaacgcagcgccgaccgtcaagcgtgtggcgcaggagctgggcgggaagtcggcactggtcatcctggatgacgccgacctccgcgccgccgtcagcggcggcgtggcgcagtgcatggcgaacagtggccagacctgcgtggcgccgacgcgcatgctggtgccacgcgagcgctatgacgaggcggtcggcatcgccgccgccctggcggatgccacgaacgtcggcgatccggaagatccggcgaccagcatggggccgctgtcgagccgggcgcagtacgagcgggtccagcatctgatcgccgtgggcatgggggagggcgcgcgcgttgcggcgggaggcctggggcggcctcggggcctggaacgcggcttctttgcgaggccgaccatcttcgccggtgtgcgcaatgacatggccattgcgcgcgaggagatcttcgggccggtgcttgtcatgattgcgcatgacggggacgaccacgccgtggcccttgccaacgactctcccttcggcctcgcaggctatgtgatgtcgggcaacgccgaccgtgcgcgcaaggtggcacggcggctgcgggcaggcatggtccgcatcaatggcgcgccccccgatctgtcgctgccgttcggcggctacaagcagtccggcaacgggcgcgagttcgggccggaaggcatcgcggagttcctggagacgaagtcgatcatcggctgaatgccgggcttaagctcgttatggttttcccgctcccacccggcgaaccctttgcccggggccggagcgtacgtcaaaaatgtcatcaccatcaagaatcggagacaactcatgcgtacagccagccccgagtcccccactgtgtccacccctgcggtggtgcggcctaacgccttgcatgcctcgttcacggtgagccgcatctcgccggcgctgggcgccgaggtcggcagtatcgacctggcggcgccgctggacgatgacaccatttccgcgcttcgccgcgcgctggtcgaacacaaggtcctcgtgttccgcgaccaggacatcacgccggcgcagcatgtggccttggcgcgccggttcggcgagctggaagtccatcctgcgttcccgcatcacgagcaatttcccgaactcgtgctgcttggcggcgatgagcgcaagcccgccatggaaaatggctatcacagcgacgtatcgtggcgggaactgccgtcgatggggtcgatgctgcgctgcgcgcagtgtccggagattggcggcgatactgtgtgggtcaatatggcgctggcctacgaacgtctgcctgatcaccgcaagcagcagatcgagggcctgctggccgtgcatgacatcgggccggcgttcggcgacaagatgacgcccgagcagcagcgccagtttcctcccgtcgcgcatccagtcgtgcgcacgcacccggagagcggggagaagatcctctacgtgaattcagggtttgttacgcacttcgccaatttcaaatcgcgcaatccgctgcgtggtgcgttcgagtcgcagtcggaaaagcaggacctgctcgactacctgttccgccagcccgcgattctggagtaccagatgcgcctgcgctggcgccccaacaccatcgccttctgggacaaccgctcgacccagcattacgcgatccaggactactttccggctgtgcgccgcatgatgcgagcgaccatcatcggcgaccggcctgtctgatcgacgttcccaacaccgcgcggctcgctggatttcattgcacgctctcggcctgagatcaccaggaaacgcacgaactgcaagtgcacgggcccgacagtccaggacttggtcggcggacagatatagacggcttgcgcgatgcctcttgggctgcattgggcgaactcggccgctcctgaggtatgggtgatggctgcttgtggccgggaagcgatttccgtcggccggaggcggtcggcccttactgggccaaggcgcggcgataaggcacgataacggggccttatcgcgtcgtcggttgcggcaagtccaagcccgggctggtcgtcgcacattgttcaccggaggagagcggccaagcgtgcggccttggtcaaggcatagcgccgtggcacttctggcacggctgctcctatccggcgttgcgttgattggaaagccctggggtggaatttggtcgctgaggccggcccgtcaaactcgaggtgtcatcgtctgcctggacagcaaccggcacttcatcgtgaactacggtgaccgctgtcggcatggggagcacattgcaaggtttcgtcgagtcggccgtcaaccaagtggtgagcaggcgcttcgtcaaacgacagcagatggcttggcggcctcggcgcgcgcacaacctgccataaatccggatggccgtgctcaatgaccagttgcgatcgcacgttgagcgacggtatccatctattgccgcagaagaacaacatcgccttgccgcttgattagccccgattttgcgtctccgtatcggaccggcgaggctgacgcttcgtggggaggctaggagcgatcccatgctcacaaccgtgataatgttcgtcgccaccaccctcctgtgagacgcaaagtgatttcgcacatttttcttggcgttaacgacttcgatcgtgcttttgagttttattcggcgttgatgcatgaactaggacacaacctcaaattctgcgagcgcgacacgccatgggcagggtggatggcaacggacgcaccgcggccgctgttccttattggcaagccatatgacggcaatgctgcgcgaggtgggaatggtcaaatggtggcattgcttgcgcgtgatcggcagaccgttgaccaggcatacgcccgcgcgctcgcaaacggagcaaattgcgaaggcgctcctggcctaagagcccagtatcaccctcactactacggcgcatacttccgagatgctgatggaaacaagctttgcgtatgctgccatcacccggtgtcggtttagcgttatcgatttagcactgacctgcctctgcgcctgtcgacgcggccctcacctcagatggccgtcgacgcgctggcgcgggcaacggaagccggtcgatgccatgcagcgcaggaagtcgacaaacgcggctggactgagatagttgtcatccgagccatccgtccggtcaaggaaacgatgggcgcctgcgatcccagcaggacactcgattatggcgcacgaccctcgccccgtttgtgacgctactggtgggatgctgaggcgatcttttgagaaaaaaacttcacgaaagcctcgaccttcctcgggtgattgcgaggtttcggaaacaccgcatatattcccggctgctcagatgcaccaatctcgtcgtactcttccagcagccgaatcaagccgccgctgagcaagtcctgctcgacaagccagtcgggctgccgggtgattcccttgcctgctttggcccatgcaatcagcgcatgcgattcgttactcgaaaatgccccatctaccggaattgccatagttgtgccgtccacctggtactgccaagatgaggaatgcggttcatggcggtaaatcaggcactgatgtcgtgccagttcggtcggatgccggggggcgccatgagatgccagatagccgggactggcgcatgttacgcggcggtacgtgctgaggcatcgagccgagaaagcggaatccccgggtcgccccgcccgcagggcgagatcgaagccgttggccacaaggtcgacaatccggtcgctaacctggagatcgaggctgattctcgggaagcgtgccgtgaactcatccagatgcgggtacacaaaggtcagcgccacgcccagcggtaatgtgacgcgtaactcaccccttggttccgacgcaaggcgccggaccgcatcttccgcttcatgcgactgttcaatgatgcgcttcgcgtgtttgtaccagagcctgcctgcctcggtcacggcgatgcgacgcgtcgtccggtcgagcaggcgcgcgccaagccgtttttctattcgggctagtgcgccggtcaccgtcgcaggcgcgagtccgaggacccgggctgcctgcgccatgctccccgagtccacgatctggcagaacacctgcatgctgaacagctgatccatcgtcgattattcgtaaatcatgaagaatccattcatgggcggctactttatcaaaatttccgcacaccctacgatcttctccaatttagcattcatcgcaacacttcctggagaagcccatgacccagcacggcagttgtctctgcggacacgtcaaataccgaatccacggcccgctaaccgacgtcctgaattgtcattgttcgatgtgccgaaagcttcatgcctcggccttccgcacgagagccaaggtggcgattagggattgggaatgggtatccgggcagaacaccgtcaagttttacgagtcctcgcctggcgagcacaagggattttgcagcgaatgtggctcaagcatattgacgcgatttgacagcaatcccgatgtaatcggattcccgctcggtacgcttgatagcgatcccggcgtgaaggccgagcgccatgtttttgtcggcagcaaggcgtcgtggtatgacatcaccgatacgcttctgcagcacaaggaatactgaggccagtcggaacgcagtacacatacaagggaaatatcacgaataagaagcttaaaataaagactagtggaaagccacaacaatgccagtctcatcggctagccctcagctcaccactttgctatgtcttttgacaggtggtcttactcaacccaagttcgcgcgcccacgtcctggaattggcgtcgatatgccaaaggtgtcgaacccacgatctgccgaaaccgcctggcaaagttatttggttcaccgaatcccgtgctttgcccgatttctgcggccgaggcggatgtgaaagccagcaaagtctttgcccgctcgatccgcctttcagtcacgatctccagaaaggtctttccggtttcactcttcagcaggtgggccaggtgtgttgctgatacatgactggcctgcgcagcgtcgcccaaggtcagttcccgcgaaaggttttgggtgatataccgaatgcagcgcagcacggactgcttgtacgactgcagcaacatcccgttgctctcgcaaagacgaatcttgtcaccgtggcgtcgccacaccatgccaatcaggtttagcaagtggctgcggatcagcaagttgctggccgtatcgtcactgggcgattgctgggattcttgcgccatgcgctcgcatagctcctgaaggtactcggtgtccagttcatcgaactgaaaatccagacaatgctgaaagcggaagggaccaagctctggcgcgcgcgcgagcggcacttccgacaactcgaagacatcaaggttaagcgacggtagcagatactctttgctgatgttgattacgtggaacttgccgtccgctacgttcggaatgtagtgaaccagaaacggcaggacgaagcttacggtgccggggcgaatgggccgctgctggcccccaatgtagtgagtggtttcgcctagtgtgttgacgtaaatctggaagtactcgtgacggtgcggcaccgggttcggcagacagttgctctgatcgtggatgccaaagtaggcgctctgcgcccgggccgccatggtgtagttccggatgacagcacccttctcgccgtcgtggtggaggggcagcagcgggtcgttcgagggcttcgctcggtgcatggaaacgtggggggcaaaggatcgtaaggattgcgcatcttttcgcaagcctgtgcgttgaggccgaacgaccgcgtctctaaactctagccactccgttcaataatcttacacagagacaatccttatgcctagagccagtgcggacagcgtcgtgcaatcgaccaaggtcctgagcgttacccccgccttcattgatatcgttggcagcgatcaacgcttcccggtgcggcgcgtctattgcgtggggcgcaactaccttgcccatatccgggaaatgggggagggtgacgaacgcgaccccccattcttcttccagaagccggccgatgccattgtgaccgatggccgcgtcccctatccgacgtttactgatgactttcagttcgagtttgaactcgtcgttgccatcggccgtgaagcgacggaagtgccgccggacactgcactggatcatgtctttggctatgccgcagggcttgacatgacgcggcgggaccgccaacgcgaatgcaacaagcgcggcctgccgtgggagctgggcaagtcattcgaccattcggcgccatgcggtcccatccatcccgtggcgaaggtcggccatctccgttcgggcgcactgagcctggcggtaaacggtgacgtacgacagcactcggtcctggagaagatgatctggaacgtccatgaaatcgtcagcgagctgtccaggcagtatcgcctgcttcctggcgacctgatctttaccggcacgccagaaggcgttggtccggtgcagcgcggtgacaggttgatcggccgtattgaaggactcgaccccttgcaggtcgagatcgtctgagtcccgggtcaaaggaaacacgccatgaaaccactcgaacgcatctcattttcggccatttccgagcgtcccgccctgacgctgccggctggcaagcgcctggccgtttgggtcatcgtcaatgttgaggaatgggatatcaacgagaccatgccgcgcacggttctcacgcctccggcgggcggttcgccgatgccagacatcccgaactgggcctggcacgagtacggcaaccgcgtcggcttttggcgcatgctggacgtcattgacgagcttgggatcaatgcaacgctcgccatcaacggcgccgccatcgatgcctacgagcctatcgccaaggcggcgaaggcgcgtaactgggagttcatcggccatggctttgggcagcgcaacatgcagaaggtgcccgacgaagcggtcgacatcgcaaagaccaccgaggccattcgcgcctacaccgggaagcgcccccgcggctggctcggaccggggctcaccgagacctggaatacacccgacatcctcgcggagcaaggctacgagtacgtgtgcgactgggtgctcgacgatcagcccgtggaactgaggacgcgagatggcggctgtatcgtgaacgtgccctacacacaggagtgcaacgatgtagcgatgatgctgatccagcatcacaaggccagcgagtatcgcgaccgcgctatcgaccagttcgagcaactctacgccgatgcgaaggactcagcccgcgtgatggcgctggtcgtgcatccgtacatcatgggcgcgccacaccgcctgcgctatttccgggaggcgctggcgcacattcgggcacacgacgacgttgccttcctgacgggagaacagatcctcgattggtataaggcagcgcgcgcggcctcatagccggatccgtacatcgccagaaactcgaacaaatctctcgcttgacgagaaggagacaacacgtgaattcctcgacttcggccggcccgctgaccggagacgtgcgcagcgatgcgcccgtcacggcattggagatcggcatgtttcttgtgctgcttgcctcctatgcgctcaacgcgatggaccggcagatctttccgctgatcgccgcagatgtgcgaagggagtttgggttcggcctcgccgacaccggcctgctttcgaccatctttacgctcggcatggcactagcgggggtgccgacaggctacctgctggcgcggtggtcgcgcaaggccgtgctccagattggcatcgcgatcttctcgcttggcacgctgttgactgcctactcgagcggctttgccgacatgatcctctaccgcgccgctactggcatcggcgaagcgatgcagctgactgtggtgatcgccatcgcggcgagctatttcgctcgcttccgcgcgacggccgttggggccatcaacttctccttcggtgtcggagccatcgtgggaccgctgctcggtgggcacctgatcggcattgagcgaaactggcgcttgccgctggtggtgttcggcctgaccggatttgtcgcaatggcgctgatcgcggctaccgtgagcaagcgcatgaccgaaaaggccagcgcgatcgccacgcacatcgacacgcgcggtgcaaccacgatgtggaaccgcaacacggctctcttgactgtgatgagcatcattggcgggttgtgcatctatggctacctcggcatgtaccccacgttcctgcgcgagcatctgcactacacgccgtcggacactggtcgcgtcatgagtatcttcgggtgcggcgtgttcgcctccatctttggcggctggcttggcgaccgcttccaccccaagcttgtgttgtcgctgagctttgcggggaccgggctgctcggcttccttctgttctcggggccgacgggcatgttggtccaatcggtgctgtcattcgtgtgggggctggtggtaagtggcgtgctgtacgtgaacctggccggctaccatatcaagtccgtgcgctcttcgctcacgaatcgggccaccggtgtctttgtcacgacgctctacggcgcgggcgctttcgcgggctacatcatcggcggcatcgcggcgcgctttggctggagcaccgccggctttgcgcagatcaccttgctatcggtcttcggaatagtactcaccgtgctactgcggaccgaccggatgtccttgcctgtgcgtaagccatgacgccggccgaatgggtgctgctcggtggcgctgcgactttcgccgggacgctgaatgcggtggcaggcggcggtagtttcctgacactgccggccttggcgatggtcggcgtgccgccggtatctgccaacgccaccgggaccgccgcgctcctgcctggctatatggcgggtgcctgggcacagcgcaaggatctgttcggggccgatggcaccctcgcttcttcggctaagcgtgctgtcggtgctgggtggtgcggcaggcgccacgttgctgctgtcgacctcgaacagcgacttcgggcgcattgtgccatggttgctgttggccgcgacccttctctttgcctgtgggccaaggcttctgcgcaaaggagccgtcgcatcgcagtcccccagtgaatggatcacggacatctgcatcgctgcggtcgcgatctacggtggctatttcaacgacggtctcggcatcttgctgctggcggttctcgctgcgctcgggcacaccgacatgagccggatgaacggcatcaagaacttcgtctccgtgatcctgacgctgatagctgtcgtcatttatgcggccagcggcgccatcgcctggacgcatgcactatggatggcgatcggcgccacagccggcgggtatttcggcggcgtcacggctcggcgacttaaaccggccctggtgcgtggcttcgtcgtcctgacagggctggcaatgaccgcagcattctttctcgagacgagttgaccacaaccgtcttcctgcaatccaaatcgcatcggaaaggaacatgagaacaaccagaagagaattcgccaaggtcgccggcgcaatgatggtcgcggcaaccgggatcccctcgcttgtcgcttcggcatcggcttcggcgggaggcggcatgccatccgcggcgtccggagcccgtcgaggcacctacctgatcaagaacggcatggtcatcacggtcgaccggaagaatggcgtcatgccacgcgccgacatcttgattcgaaacggcgtgatcgagaagatcggtcggggtctgagcacggccggcgcgcagacgatcgatgccgcggacatgatcgtcatgcccggcttcgtcaactctcactaccatatgtggagcgcgatcggacgcagcttcaccgcgcggaacggcggcttctcctactacccggccaagagcgccacatccgccttgtacacgccggaggacttctacaacagcgtgctccttgcgtgcgccgaactagcgaacggcgggaccactaccgtgcacaactggtcgcataacacccgctccgcggcccatgcggatgccgaacttcgcgcgcaccagcactctctgctgagggcccgttactcgtacggccacattgacaagctcccggtagacgaggtgaacaggttcggcgaccttgcgcgcgtccagcgcaaatggttcggtgcaaactccccattcgaaggtttggtgcacctgggactgaatctgcgtggtccgcaacagagcaccgatgctgtctttcacgaggaaatgaagttcgtcaagaagagtgggcttcccgtagcgatccacgcgccgcaggagtcgcccaacaatgtcgatgctgtcgactacgagaggcgcggttacctcggccccgattttatgatcgcgcattacgtcccggcgacgaccgaggacttgatggcgatggcgcgcacgaagacaccgctctcctttgcgacacattccgaactccggctcagcagcacgggcgatgcccgggctgcgctgttcgcgatgcgtgccgcggggctgactatctcattgtcgagcgacgcgacgtccattgccccaccggacatgttcgaaatgatgcgtttcacctggaacctcggggtgccctgggttggcacccccagcgagcgggcaagggcggtcagcgtgcaagaggtgatcgagatggcgacgatcaatggagccatcgcgatggggatcggcgacatcactggatcgatcactgaaggcaagcgcgcagacatcattctggtgcgggccaaggatctgaacatctggccaataggcaatatcgaaacggcgattgtgcagagcggcagcgccagcaacgtcgacacggtgttagtcgatggccgaataataaagagaagcggtcgcttgctagcctacaacgtggacagcattgttcgcggtgctcagcagtcctccaatcggattctcaatgcggctgatgagatgatgaagttatgagtagtctaaagagtgagtgggacgaacgccgccttctgttcgagatgaaatgcacaccgaactccctccgtggaccaggcagcgggagttatttgtccgcccaaggggcgaccactcgatttagtcgagacgaacgcgagcacgttcttcgcatatgcgttcttcgttttgtacggtccggcaaggcaacgccgcgttgtccggaccttcatcctttacttcccaggccctgcccatgcgcacagcacgcttgctatcatgtagttctatcgcggcccttgccaccctcgttgtgccggcgctctgcatcgccaatgccaacgccgccgagcagatcgtcaggcatcgcaacccggcgcacatgaccgaaccgtgggcgcgtgagttcgcggaggtgatcgagattcccgccaatgcgcagctgcttgtgctcagcggcgtggggcccacggtggcgaatgcctcggcgccgcccgataccgcggcctcctatggcgacaccgcaacccagactcgcagcgtgcttggccagatcgagcgcatcctccaggatcgcggctatcgcatgggcgacatcgtctccatgcaggcgttgattgtggcagacccggccacgggcgagccagacttcaccggcttctcgagcgcctataagcaatacttcggaacagacaagcagcccaacgtgccggtgcgcacgcgagccgaagtcttgcggctggtgccgccgggatggctagtcgaagtcaccgtcatggcgagccgtgtgccgtcgcggcggccacagtagaagacataggctaactagcggtgtgccgcaaccgggagggcggagctcgcgtggccgggcgcaggtagtgggacagcgcacctaactctcgctggaacatgactgagtgcgccgagccgccgcctgcgaggcgggttgcccagggatcggcttggcggcccgacgagctgtcgcgtgtcgtggccctcatgtgttgcagtggtgctccccggtatttgctctcgattatgatctgatttatacaataaggccaaatgaaagtaagagcattatgtatcgcttcgctaggagttgtggtgctaactcaaacatcactatcctgtgcgcaaaattttaatgggaaaaatctctttacgcagagatgtgccatatgccatggagcagacctcaaagggacagggccattggccaagaaaagcattcctcccacacctgatctgacaaccgccgctttcaaaagacgactcaatgattatcctggtgttattgtttcatcggtgatacttcgtccaaatggagacttgattccaagaactttgcaagagaatggtgtgaggctggcgccgcactcttggactgttcaagattttcgagatttaaataaatacatgagtggtgtgatttcaaatagccggtgatcttgaggcaagaagacgatacggaagttcggtgatcgcggccacttttccttgtgtccggccgttagccagacgacattagtctggcgtgaagggcggccagattctaagtgactgctctggatttgaaccgttgtctgcgccggttcgtaggcagttcaactatggggcttgcgcatccgcatgtcctcgatcatgcgctggcgcggcgggctgatggtaggcgtcgggattgacatggctgtgctcctgtcgaggatcgaggcaaattgcctcgatcctcaacatagggaacagcacaggcggttcagtcactttgtgcaatggccggagggctaccgcgcgagcggtttagtccactggccggacccggacgaccgcgcaggttggtggatgactgtgatcgtagaccgtgcctcctgccctaccttcgacacgacgttgctgtctcaggacaggttcactgcttcacgggccaacttcaacgaagagaccaggcggtgcacagaacgcacgcccgtgccgacttttgaaaacatgctggcggtacgaccttatgccacgccttaacatggccagtcttgcagtgctcagccatctcacttgcgtcgatccctttccatcaccgggtcctgggcagcatgcagcgggaatcggcctggcccgtcgacgccgcaccccggcgaggagccggcgcgtcgtgtcgcgctggcgtggctgacctcggccgatccggcaaatgcggtgcgcctcgcatctgatgaagagcgcggcgcgctgctatctgcctttagtacagactcaagtagcccggcggggttaccatcagccgtttccctcgtcccccccgaagccgtcgatcagcgcatcccatcttggcggcgcggtaaatacctcatccagcaagtcgaggaatgcccgcacgttggggcttgcgcgccggctctcgggccatagcgcggtaatgttcgcgcgagggaccgctaaccgcggcatgaccgggaccagctcccctcgcatcacatgcgtcgccgccagataggtcggcatgatgccgatcccgccgccggcgatgacgatcgacgccaccacgtcgcttacatccgcgacgatgcccgcatccggagcaatctcgaccagctccccatccacggaagacggccagcgcaacgcctggcccgaactctggaagcggaatttcacgcagtcatgccgatccagctcctccgggcgcgtgggcgtgcctttccgagccaggtacgcgggcgcggcaaacgcgcagatccggtgcggcgccagatggcgcgagatcaggcgggaattcgggagatcgcccacgcggatggcgatatcgatgccctcggcaacgaggtcggccatctggtcgcggatgcgcaggtcgaccgcgagggcgggatgccgcgcgcgaaatagcaccagcgccggtgccagcacatgcacgccgatcggatacggcgccgccacgcggattatcccggaaggaccgtttctagtggaaatcgcggcctgctgtatttcctccgcttcgtgcaacaggcgcatcgcgcgctcgcgcaacccctcgccctcgtgggtcaggcgcaacgacctcgttgtgcggatgaacagcgggatcccgagctgcttcaacacgctttcacccggcaccaccgacaccccgctgttgggccgcacgctcggcgacgccagcggcggctatgtcacggagctcagcgcacggctgccgctgaagaagatcgttcctatgcaacaggctgccgccgccgtcatgttcctgatccagaacgacttcatgaacggcgagacgctgcacatcgacggcggccagcgcctggtttgagccggccttgccggcagccaacggccaggttccgtttggccggggacgacattgacctagcctcacgccggccggcgctcttcaacgatcttcttgtcgctactggctgacgtgccgggcccggacgtcgcgcaaactcatgactttcttcctgctggctccatgagcaccgaaccaggctaattgcggcgcacgaaagagccgccatctgcggctgatcctctacttaccgctttaggagtcctgagtgcttcgaacgttgcaccgacgcgataccaccaataagtaggcttcgataacctcgcgttgtttgcgagcattgtttcggacgtcgccgcgattgcccacccattcttgaagccctcgtcaacattgtcgacagcttttctattgtcggacggcggctgatagtgcctagcacgaagcgatcggagaccgctccatcgacagcaaggagtcgggccatgccgggggtaacattcaggtacgtgtgcgacgtactccggcgcgggtggtacaccgggttctgcctggttacaggtttgagagcgtgctgctttgacgtgaatcaatcacaggcggaagagcttacgtaagcttgaatcgttgctataggaggccgggatgaccattgtcgtgctaccgagcgacggctcgccatacagcattagagccgcgagaagactggtttctcccggtctctttgagcgcccgctggaagtgcacctagtgcacgcgtttcccgatatcagcggcagggcgcaggcatatttctcgaagccccagatcgatcagtgggcaaacgaggccgcagataacgcattccaggcaattcgcccattactgaaggcggctcactgtgcggtgaccgaacatgcttgcattggtgagccagcgccacgaatcgtagacgtggtgctagcgtgccgagccgacgtcatcgtcatgggcacgcacggccggggcgctttcctgtcggccgtcctcgggtcggtggcagcgcgcgtgttagcttcctctcccgttccggtcttgctggtgcctaagcaccatggccatgactgaagtgcggccacggtgacacgcgatagaggtgagtctgcagcagtgcatgtctgcgggttccgctgctagcgcagggggacggctgccgtcacagaccgcatgttgtcgtgccgtcgcttgtcggcagctcatgtacaatcgccgatagggtgtctacgctgcacgtcgcagtgagacaggttaatgcgttggtcgggccgccaacgcaaatgctctatgactgtggaccgactcccgcccccaccgcccccaccacggcaaccattgccgcgtgctcaagttttagccgagaaggcattctcggcgctcgaacattttcttcatatcgaggccgtcagcggcattgtcctgctcgccgccgccgggatcgcgctactttgggcgaattcccccgcttcccacagctaccacgccctatggcataccccgctctcattcgggataggtagccatctggtatcgcaatccctgcatttctggatcaacgacgccctgatgaccatcttctttctcgtcgttgggatggaaatccggcgcgaaatccatgagggagcgctggcgaacgtgcgcctttcggccctgccaatggctgcggcgcttggtggcgtgatcgtccccgcgttgatctacctcgcgataaacacagagatgccccagcgccagggttgggcggtgccaaccgctactgacatcgcgttcgccgtcggggtgctcgcgttactcggcaaatccatacccggcaacgttcgagtgttcctgctcgcgctggcgatcatcgacgacattgtcgcggtcctgattatcgcagtggccttctcgggcgggttggactatggggggtttcttgttgcaggtacaggtattctaatggtcctggggctgcaatggatcggcgtcggaaccgcctatgcttacgtcgtaccgggggccattctgtggctgggaatgctgaagaccggtgcccacccgacgctcgctggcgtcgtgcttggcatgatgacgccggtactgcccggtcgcacgcgagaacggcctttggatgtggccatgcgtgcgctccttgatctgcgcgctcgcgcgaccgctcggacacctaaaccagaacacatcgcggcaccgcttaagcaactgcgtcacgcccagcgggagctactaccgcccgtgatccgtgtacagatggcgcttcacccttgggtcgcctaccttgtcatgccgctctttgccttggcaaatgccggagtgagcattgatggcgtcgatctcactagcggcggatcgctaggcgcgatgtttggtgttgtccttgcactggtcgtaggcaaacctctcggcatcgtgtcggtcagctggctggccgtacgcctgggctggtgccagttgccgcccgacgtgacctggcgcggcgtatgcctggttggactactggccggcatcggcttcacgatgtcgatattcatcgccacgcttgcgttcgaggatgtcaacctacttggggctgccaagcttggcgtgctcttggcatcggcgatagctgccaccatagggctgacctggggtttcatttatgccaggggccgaagaccgagcatggaacgagccgacgaatctactgcggcggcgtccgactgaaggggctacgcgtgcatcggcgtgggaagttgctacagaatcgaggctagccataccgcgatgatcgcctctaaactcaatgtcaccaccagcaccagcttcgccacgccggtgacgtcacccaaactgatcgaatgggtttcaacccgggtaatcaacctagcacgcaatcgcagcgagcggttgaccatcaggcccaagggtggaggccgtcatcatcccaaagccgccaagctggaacagtgccatgatcaccgcttggccgaatccgaatccggaccagtaagttcccgtgtcgacgataactaggccagtcacgcagaccgccgagactgcggtaaagaatgcggtgagccagggcgcgctcccgccatcgacgcgtgaccaaggcaacatcaacagtacgctgcctgccatgatggccagcaggaaacccatggcgacggtccgggtcggatgcaaggatcgtttcatgcacagaattgtgctatgagacgtgtcacaaatctaacatttccacagaccaccatctttgcaccatctgggcgcaggcttcctggcgtcaatggtcatcgcattccattgcggacttcctgcaacacctcatcgaaagtgtcaacgcggatcatgcccagccgcggaaactccaagtcgacgatgacatagagtgtcaccgtcagcgaggccacgaaaaaaagcgcatgcaaccagtttcgaggactgcggctggccatgccatagcccgcaaacaaggccccaacccagcaaagcgcgaaaagcatgccgaagatgacgacgggtggatgttcctttgttgctgcgagtcgggtcgatgccgtgtcgaacgctgcattgagggctggtaacagaagcatggtggccgccgtactagcggttcgctgggactccgttacggatcttgtccagaggcgttcacgcagcacgtccgaacgtaccaaggaagcctcgacgcgtttgcggtttgggacggctcgataggcgtcaagccgggcatcgagatattgccggaatatctcctgcaactcactacgtgctggtggcggtagcagatccagacgcaggtaagcagtgccgatatcgttggcttcctggacgatcagcgtacgccgcatatcaaagcggcttgccgccccggaaaaggtgaaggcgatcaatagcccaagcagtgcgaatatcgcgcttgcgaccgcgctgacgcccgttgtctccggttcgcgaccggaggaaacctgccattgccacaccagccggccgagctccagggcgatcaggatacttatgaatattccgaccgccaacaccagcccgccggcccaatcggcaccataaagtagtgatgccaaaatcgtctccggtgcatttccgcgatgcgcggtttcaacgttgaagacggtatggaaaagcttcgtcacagtatgtgcgcttccgcacaggcgtccgatagccgggtggaactgacgcttgagcgtcggcgtcacggcataagccaacgtccgtagatggccggcaagcgctcccctcgccggccagaggtttgtcacacttcggtctgctcagccatctcaagcgcgtcgtcgacttcgataccgaggtggcgaaccgtgctctcctgcttcgtgtggcccagcagcaattgcactgcgcgaaggttcttggttctacggtagaggagcgacgccttggtccgccccatggtgtgggtgccgtacgccgtgtcgtctaagccgatggactcgatccagcgatgtacgagcctggcgtactgacgtgtggacaggtgggccgaggcgtgaatccgactcggaaacagagcatccgacgagcgcaatccgcgatgggcgatccatgcctcaagacttgagcgggtctgctccgtaatctcgaactgaaccggtctatgcgtcttttgctggatcaccatcgcgcggatactaacgcgggtgccctgacaaacgtctcgtacgcatagccttgtgagatcacacgctcgaagcttgctatcgatccacctccatgcgcccggccattcaagttgcccctggcgccggagtctgatcaggtgcaggctggactgctactggcaacgtcatccctgccgcagttcgacgctgttcgtacttagggtacagggcggcggttcattttccgcgggcaggcgctaacgcatgcctgggcgtggcggtgaaaacggacgctcttcgacccatctcgatcgttcgtatgtcgtccatggaatgacggttcttggccggcaagcgaccgctcgccggctgtcaggttgtcacacgtcagtttgctccgctatttctacatcaagtccttcctgatcgaaaaaagaggctccctttgaagcctccttttctatattcgtggaaagaaaaaatctgttttggacacacctcttgagttagagaccgctgccgtagttggtgggtacccagctatatgcattcccatcacgatggatatgccccagactaggaaaagagatgtgcgccgcggccacccaatatccctttgcagcggcatcggcaaatgcccttttttttacgctgccttgccgtagcaacttggcatctcggccctctttgtcaggtttccgtcatccatgagcaggtggaactgggaatccgcttcggtgaggagagccgcggaacggcggaagtgggaacaacgtaacacgcagccagccgccgccggtcagggcgacggaaaaccttcaatgctctattcggtaagcgagacgcgagcgattcgcactgagcatttcgaatatcgcaccgcattgactccagtgactcgctagctcgctggaagggtcgcatttttcggggccgtgttttccaaaacacccacccacgagaaagcgtcgcaccaccgcttcacccttgacgttgcgtggctcgttgccgaaggagttgcgctcaaggaccttgccgtcgaggacatggaccagcaactcgacctgcttctccttggcgcgttcggttccggcggcgagagcttcatcttgcgtttcgaacgtttcacgtccgacgcattccgtttcaattggccagcggcctccaatcgttggacgtcgcagcccccggcggcgaacgcagcgcgggaagcgacagcgcggctacgcgctgcgtcaagccagtagcgcgcgggggcacatggctaccaagtgtggcaagtccgagcaatgtcttgtgaggccgggaggagcctgcccacacgagcattcccggcctcgcttttttaggtcggttatatgtgccagccaaggcgacgcgcaacatctaggagcgcccggcctgtaccggtgcggcgcggcggccgagacgcgcccccgggccgcggtaggcggggaagtagctgtccagatcctccagcgttgattcgtcaccgccgcacaactccacatagcggtcgggatcgaccaccaggcgctgggtccgatacacatgcgtgtcgggcgaaaagccccgtttgaattcgtgcagcgagtcgctggccgagccccccaggccgccgcctaagtgaaggtagcgcaggccgttgacgcggccccactcgcgtgcggagtggataaccgtcttggtgggctggtaatggtgatacgcccggtcccatccggccaagtgatactgcatgatgccggtgccgcgggctacggtgaccaaagccccgccgatcaccgtgtcggcctgttcggctacgaacagcagcagatcgccgccgagcgcacgtaccagcatctggtagtgcgtcgcgtggaagaagtagtaaggcgcggcacccaaccgtctcatggtccagttgtacagctcgatgaagcgcggcagcgtggcgaagtcccggtccagccgcgcagtaacgcccgcgcgccgagcgcggctaatgccttccttgtggcgcttctgcgtttcctgccacagtcgatctgcgcttttggacaggtcgatcgaaacggtcgtgccatggttgaccacgcgtcccagagggctgtcccagcctgcattgagcagcggatgcaggcggataaaccaggagatacaaccacgctcgcgcagcagagccgtggcagtggccagtgcttcgtcggcaaattgcgccggtgccccggcgctcagtaccgggccaccgtagccataggccgtggttgcgtcccaggtgccgcgggaaatcgcgcggcgcaccaagggaaccagcagtatatgagtgccgtcagtaacgcggacggcagcggcgctgccgtggtcgatgcactgcgcagcggcgtaccagccgggcgtgtggtggcagtcatggtggcagcgcgccagtgttgtgcgccacgccgggttggctggctccagcaggctagaatgcatcgaagcgcccggcttctagccaccgtcgcggaccacatcttcagccgggtgcctgcggcgccggcatagtgcgctgagcgacgaggcaagcagccgctcgcaatggcgcaaccatgactgccgcagaacggcacccggcgacgggcacggctggacgatttctgtcgacacttcaggccgtaatccaggcagtgcgaaaatagcgtgccccctgtgctgggacagcaagtcctcgcgactaacttcctgcaccccgccgtcccaacctggcaaggcgaccaaaaaccgcccgtgttcgcagcgctgaagcagaacgcacggtcggttcttgcccagcaacaggatgaccggcaacgaggtgtccgcgatatcgtcaagctcccgctctaccagccgggtcgacaagccggcgcgtgtcgccgcggcgcagaggagcggaaacgtcaggccctgtccttccagcggcagcccttcgagtagtacagcggacggtacaggccgttgcaaggcccggttcagcaataacaggcaacccagcatcggatcgtccgctcccgtcagctgtctcattgcggcaggcggctcccggcggccagtaatgaaatacaggtcggaagtgccggaatgcgcggcggatgtcctcctgggttgctgtgtctgccgcgatggcactgatgcaacttctatgtcttgtgccggcgcctcgcacagcgcaaggccagccgccgcgtgtcgctcgcgtggataccgctcacccatgatagtccccccggcttcagtggtgtgatctgtactgccagcgtagcgcaccagagcgccagagcccatcatgcaaacagcctagtgcgcctgttgtccgtttgatggtggcgaccagaatggaggagccgtccccttaggcgccccagttactgggcctcccaatattgccggatcctcgcgcaggatggcgtgcagagttagtgtgccgaatcggaagcggtggaatgccaccacattggccgctatcgctccacgagtaaagcagcgacagcgctagcggcggcctgggcccagcgaattatcctgggcgcgcctgagcgcgctaagtcccttgggcgggaaccgcacagacgcgagcgaggcgttccgcctcgacagaggctagaggccaaaagccgtcacagcattttggaatctgtcgatgccatgacaacaatgcaaatgaccaaggaagagttcggccaagagaaacccgggtgaatgaaaggtacagctcgccggtgcgtggactctgaatgtggagactcgccccaagaggccatatgcctcaacgctcagtcagagctttgatctcgttattcacttgccccaacactcatcggcgggttgtatgaagaagctacacaatggaactagtgcgcggcattggccataaggatgactctgtacggcgggattggaaaggggctcgttgccgggattacccccaaagcggggacaacgacatgctgagtcgtcgcgtgaaatggttctgttgtgtcgcaaacagttctacctcgtcagggcacgtttcttaaatgaaacttagggcaatgccgctggcgactgcggggacatcacgaggcgcccacaggattggctatttctatcctgtcgttcctgatgctgccccctgaactctggagcgcatggcgactgcgatcagaagcatattaggggtggctcgcctccggggtattgcgcatgctggcatgccttcccactctgtgcactggccatcaaggtggggaatgaggcgtgcattccacaaggcacgctcttgcagtggcgcattccgaatgctgtggggaatatgcggcaactctctaggcccgcgatctggcgggttgggcaatcgaccggggggcagactatgagtacgaccgaagccgtcccttgcttactatgcgccgttcttgcgcgacgctgggtcgaccaacgagatcgcgggcgtggtagccgcatctatcgctgtgctgcctgtggtgggcgattcgcagtcactggcgatgctctaggcgccatcgagcagggacgttgggatgttgccaagctgaaggttgcggttaggcggagcattgcttcgggcgtccttccgcgcattgaagttgcagacggatggccgagcgtgatcgcgatcgggcgtcaggcatcctgagttcgttccatgacgctccactgattgtcgccattgcgccaggcaagctcgcttgaaagccacagtactacctctgccccgatgtgaggaggctctcttgagggtactgtggaacctgcgcgccgagcaccccgaggatgccagaagcgttgttgttgtcagacactctcctacgaaaatttcgccgtaggagaaacctcaatgtttgaggcaagcaggactgggccagagagctcttcgcctatcttcggcgtttgtccgctttgacggaacttcggccagtggatgcatgaggattgagcggcagaagctggccggcaagcgctcccctcgccggccagaggtttgtcacacttcggtctgctcagccatttcaagcgcgtcgtcgacttcgataccgaggtggcgaaccgtgctctcctgcttcgtgtggcccagcagcaattgcactgcgcgaaggttcttggttctacggtagatgagcgacggccttggtccgccccatggtgtgggtgccgtacgccgtgtcatctaagccgatggactcgatccagcgatgtacgagcctggcgtactgacgtgtggacaggtgggccgaggcgtgaatccgactcggaaacagagcatccgacgagcgcaatccgcgatgggcgatccatgccctcaagacttgagcgggtctgctccgtaatctcgaactgaaccggtctatgcgtcttttgctggatcaccatcgcgcggatactaacgcgggtgccctgacaaacgtctcgtacgcatagccttgtgagatcacacgctcgaagcttgctatcgatcgcaagattgaacagtgcgagctcacgaagattcgacgacatctgtagccttgtacgaatcgcccagatctcgcagagcttcagcggcggcttttgtccggtgaccttacccttattcaatggcgcacgcggggtcacgggtgaattcgacgtctccatgatcatctcctttcgaacgaaggtagaatcagtttgcgcgcgctgcagatcttcgctgatgtctccgtcagtcgggctgcaacgcgtgcctcgaaaactgtgccgcagacggtcgccgaccgacccttctccgacccccaaacatggctgttgaatgtccgttgaaggcatgagatgcgacatctgcgcagttcagtgctgtcgactgatcgagcccatctcggatggtttccagcatctgactgaacgtccgcgtaggccacgctccagccgtgcgagtgaggtcacctacggctttcgccgggcgggagccccgtcaatttcgagcccctcgctagtgcattgcgaatcttggcgcgcgcggccacgctcattgccatgtccagcaggaagtggcggccgtcatgccccggtcgagccgtttgcgcctgccgcatcggtgccggtcgcgttctggccgggcattacgccagtttatacattgacatcatccaggacggctggtttggcggacacgtaagcgccagaatcccccaaccagtgaggtgaaatgaaatatcaactgttcaactacgaaggccgcgatggcacgatcaacgtcggcgtgcacgcggacagccggcatgtgcaattcgccgcaggcaccgttgacggcctgttgcaggactggcccgccgcgcagctacgcattgcgcgcttcattgcgcaactgccgctggccgccgagacgatggagcccgcacagatccgcttcctgccgccgctgagccagcccggtgtcatctatggggcaggggcgaactaccgcgaccatgtcgtggccatggcaaaggccgtcaatatggacctgacgacagatccgaaggccgatggcgtaccgccgtggcacttcatcaaggccggccggggaacactgtccgcccaccgccaggcgctgccttatccctcgcacacgcgaatgctcgactgggaggctgaacttgcggtggtgatcggcaaggcatgccgcaacatctcgccgggcgacgcgctcgactgtgtagcgggatataccattgccaacgacctgtcggcacgcgacaacctgcgtcgcgagcaggtcgatgcaagttcgccgttccgctttgactggatcggccacaagtgctttgaaggctcctgtcccctcggtccttacctgactcccgcggctttcgtggcgtcccctgaagcgctggatatcaagctttgggtcaatgacgaactcaagcagaactcgaatacgtccaatcacctttacacggttgccgagcagatcgcctacttgagcgagcggctcacgttgtatccgggcgatgtgctgctcaccgggacgcctgccggcgttggcatggaatcgggagtcttcctgaagcgcggcgacagtatccgcgtctggattgatggactgggcgaactggagacatcgttgcagtagggcaataccacgggcggcgttcgccgcctgacatggggagccgttcaggctcgcgtccgcacgggcaccacatagagtgcctgacgggcaatgacaattcgacggaggagacatgaaacagaaatgcgtggcaatcgccgccgcgctggcgctgctcgcgccggcgctggccagtgctgaagtgaaggtcggcattcttgccaccctttcggggccgtcggccgatgtcgggcgcgaccaatacgatggctttctgcttgccgttgagcaaggcggcggcaagctcggcggacagccggtccgcctgatcaaggaagatgaccaggcgcgcccggacgcagggcttgcgggggtgcggcgacttctcgaacttgagcgcgtcgccacgccgtatttcgccacctggaccgtcggcatcgtgttcgcgatgatcgccgcattcatgccgctcaatgtgctggccgagttgatcaatatcggcacgctctccgccttcacgctgatctcgatcgcggtgctggtgctgcgccggacccgtccggagctgccgagagctttccgctgtcccggcgtgccggtggttccgctgctatcggtgggcttctgcctgtttctgatggcgcaccttcaagcgctgacctggatcgcttcctgatttggctggggatcggcctgtcgatctacttcctgtacgcgcgccgcaacgcggtgctgcacggtggccaggtagcacgcggtgccagccgtaagagtcccgagacacggtaagcggatgtggaggccgaccttggggtaagcgaaaaccctagccccgcccgcaccgagaaactgggtaagatgccaacccggcgccggcgcgacaagatcgcccgcagccgaacgggattggggctccaggccccatcaacgccgcaccgcactgcaacccaggcggtgtgtcaaggaaggcagagctacagctttgcattccccacgtcatggagaagaagttgaacgaccgtacccacgcggcggccgctgtccgccttttcggcaccggcgaaggcctgtcccacgagcgcgtaacgctcgccaccgatccggaatccggcctgcaggccatcatcgccatctacaacaccagactgggccccgcattcggcggctgccggtactgggcctatcccgccgaagccgacgcgctgtccgatgcgctgcgcctgtcacagggcatggcctacaagaacgccctcgccgggctgccgttcggtggcggcaaggcggtgatcctgcgttccccggcgcagaccgaccgcaagcaactcttccgcgccttcggccgcatgatcgagtcgctgcaaggcagctatattacggccgaggatgtcggcacgacggtggacgacatgcgtgccgttcaggccgagacccgctacgtcagcggcatgccgcgcgacggcggcttcggcggcaatccctcgccgtggacggcatacggcgtgttcgtcggcatcgaggcggcggcgctgtatcgcctggaccgcaagtcgctcgccggcttgtccgtggccgtccagggactgggttcggtgggctgggagctttgccgccgtctccatgaagcgggcgccaccctgaccgtggccgatatcgacgccggccgcacgacgcaggcgcaacagcagtttggcgcccgcgtcgtatcgccggaagccatcacggccgtcgacgccgatgtattcgcgccttgcgcgctgggtgccgtcatcaccccggccgtggccgaaagctgccgtttccgggccatcgccggcggggcaaacaatcaactcgcttcgctcgccgaaggtgacatcctgcaccagcgcgggatcttctatgcgcccgacttcctcatcaatgccggcggcatcgtgagttgcgcccgggaatacctcggcggtgtcgacgactcggacctgcgcgacgaagtggcaggcatccgcgaacgggtgctcaggctggcgcaacgcgtggagtcgaccggccaggcgccggcgcgcgcggcggtgacatgggcgcacgaggtgttgtcgcgtggcatcgggccgaactgagcgtcgcgtcgaccaggaagccgatgaacgaattcccgaagccccacagttcgaccagcgccagcgctggttgatgtgctggctggggaatacgcacgggcgcgagcggagacggcgcggctgatttaggcagctaccaaccgcagattcaaccggtcaacgcaacagcttgatggaatcgttcagccggtgtatcgaagtttagtgtcttgcgcgggcgttcgttgagccgcctggcgatggcattgagcttggcttgtgaatagaccgagagatcggttcctttcgggaggtactgtctcaagagcccgttcgtgttttcgttcgtgccgcgctgccagggattctgaggatcgcagaaatagaccttgatatcggtcgcgacagtgaagcgcttgtggccagccatctctgtgccgcgatcccacgtcagcgatttgtacaattcctgcggtagcttgccagcgtgcttgatcagggcgttgactacagcctcagagtccttgctggcaatcttcaccagcatcacaaaccgggtctggcgttcgacgagtgttgcaatctgactgttggcgctgccgaacagcagatcgccttcccagtgcccaggtatcgcgcgatcctctgccgtggcagggcgttcactgatcgatacggcatctcggatgttcgtacggttgtcggtcttcagtgtgtgttggcgcgatctacgcatggctcgagaacgccgtaggtgttccagcaactcccttttcagcgcgccacgggcctggatgtagaggctccgatagatggtttcgtgcgacacctgatagtccctgttgaccgcgtacacgtgcttgagccaacccgcaatctgctctggcgaccactgcaatcgaagcttgcttgccaccacctgggcaagtgtccgattcttgacgagcttacatgcctttgggcgccgcgcgcgctcccatgtgagctcgtcggcctggttcgccagatagccctgtctgcccccatttcgccggacctcgcggctgatagtagaaggagcacgccccaggcgggctgctacggatcggatggagtggccggcgactactgcgcgcgaaatctcctctcgttcggcaagcgtcaaggccagcctggagcggtgtcgttgcgctggctgtattccgccagtcttggcgagaatcccttgtatggaggagtggtagcgatcgaacagtcgggcaatctgcgcaagcgtgtcacctttgcgccaccgctcccacatcagtgccttttgagtctcggtgtagtagatccgccgtctttgtttcatttgcagcacccctcaggctcgcaaagcctttagtgtgttgcatcgaccggtggaatctgcaacgcatagccgccattggcctcgtgaacgcggcttcttaggtgaaccgaagccttacctgaggccttcggtatccagggacttgcgcacagccggccgctcccgcatacggagataccaggtcctgagattctccaggccgtcgaagtggatgtcggtcttgtagaccgactcaagccactcggcttggccccattgggttagggaataaaggtaggcgtcggcgacagtgtaggtgtcacccatcagatagtcgcggccggcgagtttctcgttaagccaggcgtaacgcttttccaacttcggcttcgcagtctcgacgccgtacttgcccgccagcctcgcatagagcagcggaatgaagcccttatggatctcggaagtcaggaagctcaaccactcctgcagacgatagcggtcgatggtcccgttcgccggggccaagttcgactcgggtttcatatctgccagatactgaacaatggccggcccctcgcacagccgcgtgccgtcgtcgagttcaaggagtgggacgtagccaaaaggactgagttcgaaaaaatcgcgaccgtcttcagtttcgtgagttttgtagtccaccttcgcgagggttacgtccagccccaattcattgaacacgatgtggggcgacagcgagcaagcacccggaatgtagtacagcttcatttcatatccctaaaggtcatcgcaaagcggcgtgccttgctgatggatcgaatgatgctgaagatggtatagaaagggaagaaggcactaaaatgtggtgtaggtacattttttatacctatgactgagaggcttccatgaagacggctgtgtcgggatgttcggtagaggaagcaatgcgcctgctgggcggccggtggcggctgctgatcgcctcgtacttactcgaagggccgaagcgtttcaacgaactgcgaagagagatgccagacatttcgcagcgcatgctcaccctggacctgaaagcacttcaggaagtcggcctggtgaagagaacagcgtttccgactgttcctgttacggtgcagtacgaactgacagaggatggcgcgcgccttgcgcctgttgtggaggtgatgcgggagtttgggctttgggtgaagagccggccaaggccaccgcaggcgccagaaccatatccattagcccacgaaaatccggccggcggcgtcgtgcaatagcagaagcgtcgtcatggacgtggccatcaagacaggttctcataaaggggggctttgccgactacgccgcccctgtgtggcagtgagtgccgcggcgccgccacgcgctgaggcagcccgccattggcgcggctttcagcagcgcatgccggtcaatgcccttcctcgatattgaggattttccccaggcccaggaaatagtttgcaaaggcaagcacgctagccgtcacggctatatagacaactgacagcgcggccagcgtcggatcggcaaactcccggacatagttgtacatggaaacgggcagcgtctgcgtgtcttgcgtggtgacgaaaagcgatgcggtgaattcactgaacgacatgattgccgcaaacaaccagccgccaaacagccccggcgcgagcagcggaatcgtaatcgtgaaaagcaccttcagcggcgacgcaccgaggcttgctgccgcctgttccagccttgcgtccaggttttccatggaaacatagacgctcttcagcacgaacggcagcaccagcatcacgtgacacaggatgacgacgccatatgagcggtgtatggaggcctgtgataccaagatgagcaggcccagccccagcgtgaagtgcggcaccacgagcggggaatgcaggatggccagcagcgtctgcttgccggggaattccagccgtttgacggcaatcgacaggcaggtcccgatcaccagcgcaatcaacgaggaccatccggtgatgaccaggctggcgcggaatccatctcgaaaatccggataactgaagacgcgtgcaaaccatgtcagcgaataggattcaggcgggaaagtgatgatcgccttttcgttgaaggcggcgatcgtcaccaccacgaccggcagcagcacgaatgcaagcaggatggcgacgagcagcgggcccgcgacacgcagcggcaaaggcaaagcgcttttgattctcatttcttagtgtcctccaacgactttcagtcgcttggtgaacagccccagggaaaagagcgctgcggccgtcagcagcaagcccatcacactcaggctggccgccagcgggaagttcatggaagcgaagccaagctggtacaccagtgtcgaaaccgtcggcacgcggcctccgcctatcatctgaggcgtcgcaaaggcgctgaaggtccaggcgaacgcagttgtgatgccagccagaatacccggcatcgaaagcggcagcgtgaccgtgaggaaggtcctgaccgggccggcacccaggctctgggcggctttttcgtagtcgcggtcgatatgcgaaattgccgtggcaagcatcaggaccacgacgggaatcgtcacgtgcaccagcgcgaccagcacgcccaggtgtgtgaacatgagttccagtggccagtcgatcaggccgagctttcgcagcgcgccattgatgaagccattgctgcccaggacggcgatccaggagtaggtccgcacgatttcccccagaaacaggggcgtgatggacaccacgaggatgaaggacttgagcgcccgactcctgacgcgcaccagggcataggccagcgggtacgcaaccagcagcgaaaacacggtcgtctccacgctcagccacaaggtgttggagaacgcgtcgagataaatcgacttggtcaggtcgctgaagttggcgaacgtgaatccgccgacatccagggagccgggcacatacgcccggaagctgaactgcaggaccgcaatcaacgatactgcgatgcacagcgcgacaagtactgccggggagaccaaccaggctcgtgaatcggggcgcattcttaaaccttattccagatgctcaatcggcgagggaggatcggcgcggtgcattgccgcggcgaccctccctccacactcttgctagcgggctcagttcatgacgttttcagtgaaccacttgcgccattccgcagtcttctcggcgcgcagcttgtggtccacgaggatggccttgtcccactgctccttcgtcgtgaacacgccgggcagcttggcgtcttcaggcgaaaccctggcgtcgtcgacgacggggctggccttcttcaaggccacgatcttcgactggacttccggggacaaggcgatgttcatgaacttgtaagccagatcggccttggtggagcccttcgtgatggccatggtatcgatgccgagcacagcgccttccttgggcgtgaccaacttgacgggaacaccctggctgatcatgtgataggcgttgatcgacaggatgacctgcacgggcgtttcgccggtggcgatcagctgctgcgcattggcgtcattggtatagaacgccttgaagttgggcttgagcgccttgagcttgtcctgccccttttcccagctttgcgcatcgccacccgacagcatggcggaaaccgcgaccacatggctcggatcgaagtcaggcacgccaatcttgcctttcagggccgggctccacaggtcgttccagctctcgaacttgacgctgggcggcaccaggtcggcgcgataaccgatggtatagacataggcccagctgccgatgtgatacgggctgatcctggcgcgatcgacaagatgcttgtaattcggaatcttgctcgtatccagcttttcaaagagattgccgttggcgtagagccagccgacgtgggaagtcgtgaaggtaacgtcgctctcgggcttggaggcaagcttcgccttgttcaggcggtcgatggtgccgccggtgatgtacttgaccggcacgccggtttgccgcgtgaattccttgccgatgctttcatcgatgaggtcgcggaaactgccgccccaggtgctcaccaccaaggcttcctgggcccatgccgccgtactgccaagcgtggcggagagcgcgcaaagtgccaaaagcttgcgaatcgtcatttactaacccccaatcgaaaagataaacatctgatagaactggaaatacgcttgaacgtgccaccgcgaaatgcaatcacaagcagcgacgcgttgctgacgcaacgacgttgacgcaatgacttcgaattacggagcctatgatgtgaaagtcgtaccaggcggccaagtcggctttttcgtaggggtgcctcacatttcccgatggggttgtggatggttccgccgtctggagcaggttagcggtcgtgtgaggttcggtggtattcggaaattcctaaacggccggcaggaaaatacaaatggcgccgacagcggctgcacatgaccatgcagtcgggtgcatcgcccccaatctcccgccacctgccgaatcgatccgaatcgaccatgaagcatacccgcatccgcaccttcaacaccaaagtcacctacccggaacagaatctggacaacgacctttgccaggccgttgtcgcgcgaggccgtaccgtttttctgcgagggcagatcggccagaacctcgacacctcggagagcgtgtgcatcggggacgtcgccggacaggcggagcaggccatggccaatatcgcgatgctgctcaaggaagccggcggcgagctcgaggacatctgcaagatcacgatctacatcatcgaccctcgctaccgcgaggcggtgtatcgcgtcgtgggccgctggctgaagggtgtcttcccggtctcgaccggcatcgtcgtatcggccctggcccgccccgagtggctggtagagatcgacgccaccgctgtcatccccgactgagctgccatgaccttttccatcattgcacggtgcccggccaccggccagttcggcgccgccgtggcgtcctcgtcaccggcggttgcctcgcgctgcatccgcggccgcaaaggggtcggcgcagccgcgagccagaacattaccgacccggatctggggctcctcgccctggacctgatggccagcggcctgacgccggaacgcgccctcgcggaactgcagaagcgcccccatatcgagtatcgccagctcatggccatcgacgcgcacaacccgccagtggttttcacgggtgccaaggcgctcggcaccctggcaagcgtggtcggcacccatgccgcatgcgcgggcaacatgctggcgacgcgtgaagtgccccaggccatgctgtcggccttcgagcagaccgaaggcgcgctcgcggaacggctgatgcaggccatgctcgccggccaggccgccggcggcgaggaaggtccggtgcactcggcaggcctgctggtgtacgatgcgcagaactggcctgtcgtggatctgcgcctggactgggtagaaaacgacccggtcgaggccctccatgccgcctggcaggtttacgcgccgcaactgaaggactatgtcaagcgagcgctcgatccccgcgcggcgcccagctttggcgttcccggaaacctgtgaccagtccgacgcatcgaatgaagcgtgacagcgccggtcaggcagccggcactcgaaagggcaaaccttctccagtacactggatcgttccccttttcctgatctcgacatgctcaatcgcatttccctgcgccagatggagtatttcgtcgcaacggcgaagcatggcagcattgccgctgcgtcgacgcaaatccatatctcctctccctcgatctccgcagcgatcgcccatatcgaggccgaactgggcgtgcagctgttcgtgcgccattcttccaagggcattggcctgaccaccatcggcaagctggtcctgcatcactgcgaagatatgctcggacggtcgtcccgactctatgaaatcgcctccgattcgagcgacgtcatccagggcaccttgcgggtgggaagcttccagtcgctcacggcaatgattgcgcccgaggtcatcttcggcttttcgcgcgcgttcaagaaaatcgagctgcagatggtcgaaggcgatcaggaagtcttgatgaacaagctccatgcgcttgagatcgacgtggcgatcacctacgacctgcaccttgaggacgacatccagttcgagagcctggcgacgatgccgccctatgtcctggtgagcgaggtccatccgctggcgcagcagaaagtcgtctccttcgaagagctggcgcccgaaccctacgtcctgctcgatatgccgatgagccgggactatttcacctccctgtttgaaaaggccggcgtgacgccgaacatcgcggcgcgttcgcagtccacggaagtggtccggtccatggtcgccaacggcattggctacgcactcttcaatgtgcgccccaaatccgatcaatcgctcgatggaaagcgcatggtgcgggtccgccttgccggtacccatcggcccatgctgctcggcctggcgacttacaagccgatgaaacagtcaagattgacgagaatcttcatggaacgctgccgcgcttatatctccgaccaatacatccccggaatgagcgctccaagtttcttcgatccccatatagcagcgccgctgaaatcggcgtcctgaagcgccagccgcatcggtcatgccgtgtttcggcaatgccccctcaagaagggccagagatggaaaatcaagcctcctccgcaagcgcctctctcctggaaacgctcgtttctttcgcatcggtttccctgacgccaaacatcgcgctcatccacaaggtccaggacatcctggcggaagccggcatcgaatcgatgctcgcgcccgacccgcaagaccccagccgctccaatctgtttgcgacggtcggtccggtgggcgttccgggcgtcctgctctccggccataccgatgtggtgccggtggaaggccagccctggacttcacccccgtttgaggcaacgcaccgggatggccgcatctacggacgcggcacagccgacatgaaaggcttcgtggcctgcgccgtcaccgccatggtggcggccgcccggcagccgctccggcgccccttgcagctggcgctgtccttcgatgaggaaatcggctgcgtaggtgtgcgccacctgctgcgccgcctggagaacagcctccccgcaccctacctgtgcattgtcggcgagccgaccctgatgcggatcggcaccggtcacaagggcaaggctgcctaccgggcggtctgctgcggccaggccggccactcaggcctggcgcccaggttcttcaacgccatccacatggccagcgacctcgtcgcatccctgcgagacgtgcagcgtgaactggcgcaaagcggcccgcgcgaggagggctacggcgtgccctacagcacggtccacgccggcgtcatccacggcggccgcgccttgaacatcgtgcccagcgaatgcgaagtcagcttcgagattcgcaacgtctcggaagataaacccgagcagatcctgaagcgcgtcctggaacgcctggccgagcgcgtcaaaaaagaggcgctggatcctgcggcgccgttgccagacatccagatgacgaacagctatcccagcctgaacacccgcgaggattcgcctgctgtcggcctgctcgcctcgctgctccccgcgggcaccccatgcgccagggtggactatggcagcgagggtggattgttccagcagagctggaatcaaacgccagtgctgatctgcgggcccgggagcattgaagtcgcacataaggccgacgagtatgtggagctggcgcagatcgaagcctgcgaccgcatgctggccggcctcgtcgaatttctctgtcgataagcctggcgtcctggccagcttcggcccggacgcctcatagacgctatcaaaatgaagtcagcaggatgctgcggtcgaccgactggatatccgtcttgccgcaaaacgccatggagagatcgagctcgttctgaatgatgttcaaggccgtggtcacgccttgctcgccgagggcgcccaggccatacatcatggcgcggccgatatacgtgccacgcgccccgagcgcgatcgccttgagcacatcctggcccgagcggatgccgccatccatatggacttccacccgatccccgaccacttccacgatgcgcggcaaggtggagatcgatgacgctgcgccgtccagctggcgcccgccatggttcgacacgatgatggcatcggcgccgcttgccaccgccagccgcgcatcctctgggtcctggatgcccttgacgatcagcttcccatcccaccgcttcttgatccattcaacatcctgccaggacaggcgcggatcgaactgctcctgagtccactccaccagcgacccgatcttgtcgacgcccctggcatgcccgacgatattgccgaactgacggtgtctggtacccagcatgccgatgcaccagcgcggcttgctcgccatgttcacaaggttgcgcagggtcggcttgggcggcgtggacagaccgttcttcttgtccttgtgccgctggccgaagacctgcaggtccatcgtgaccacgagcgccgaacaattggcattcctggcacggtcgatcaggctttcgacaaaggtccggtcgcgcagcacgtacagctggaaccagaacggatggcgcccggtcgcttccgccaccgcctcgatcgggcagatgctcatggtggacaaggtgaacgggatgccgtgccgcttcgccgcgcgcgcggccaggatttctccatcggcgtgctgcatgccggtcagcccggtgggcgcgatcgccaccggcatgctgaccggctggcccaccatggtgctggcggtgctgcgctcggtaatgtccaccgccacgcgctggcggaattcgatacgctgaaaatccgcctcgttggcacggtaggtatattcggtccacgaaccgccgtcgacatagtcatagaacatgcgcggcacgcgctttttcgccaggctgcgcaggtcttcaatgcacgtcatctcggccatgggaactcccttgaaaaaaacaaaaagctgccggatcgcccgatccggcagctcgtgcgtgcaacctcgttaccaatgacaggtcaccgtgcagcctcaggaacaggctcaagaccgctcatacgtcatatatccgttctggagcacgatatggtcagcgatgtatttcgcatcgtgccagacaccatagatgaaggacgacgcccggttgaccagattcggcaggcccaggaaatagatgccgctttccgcggagatgccgcgcttgtggaacggatcgcccttctcgtcgaaggcattcttcacgttcagccagttgaaatcaaacttgaaaccggtcgcccagaggatcgtggtgatgccggcttcagccaggtcgaggctgaggatcgggtgcttaaggcactccgggtccggcagcagctcccaggcgtcaggttccggcggaaacggcaggccattctcttcgatataggcatccgcttcgcgcagcacgtcgaagtaggcgcggtcgccttcggcgatgttctcgggcaggcctggctcgaatgtcatgacgccatccttgtaggattgggtcaggccgaccaggttgatgcccgcgtgcgccaggcgccggaaatcgacggtcttgccgccttcatagccgctcacggcgaaagcgacgtgcgccttcttgggccggatcctcacttcatcccacaggccgagggcgcccagccaccagcagtagtcacggccacggtacgcgcgcggcgggcggtaatgctcgccgaccgagagataaaccgtcttgccggcctggcgcagctcttcggcgatctgtgagccggaagcgcccgcgcccaccacgagcaccccgccttccgccaactggcccggattcttgtaggccgaggaatgcagctgccggattttttcgctctcaggcacgatcttcggataggctggcttctggaacgggccggttgcggcaaccacgttgtctgcctcgatgatgccgtcggaagtcgtcaccctgaatccgggacgcccttgatgccgttccacctgcctgacttccacgccggtacggaccggcgccttcagcatggcggcatagctctcgaaatactgcgccatgcgctctttcgacggaaaggcctccggcgagatgccctcgaatttcatcccgggaaaacggtcatgccaggccggtccattcgcgaccagagaatcccaacgttccgagcgccagcgttctgcgattcggctgcgttccagcacgacatgctgcacacccatgtgcgcgagatgctcgctcatcgcgatgcccgcctggccagcaccgaccaccacggtgttgattttttccactgacatttgaatttcctaagaatgatcgccccggtcagtcgccccggcacggaagcttcgacggcaaggcgtactggccctggagacatcgctcatcgacgttggccagtttgatgaagcccacctcgtttgaaaatcacgtttttcaaactcagcacttaggaaaaagtaaagcgcgggccgaagggttccgcactgccccccgcacccgtgcaccacaaggcgttcccggccatcgcatccgcgccgcctgcgcctgaaaacggacatttcgttttttccgagggaccgcatcagtttcggcaaagtcccgatactggctgtttgacttatcctgcttgccagtaccagctcggcctcgatgtcattgggcccaagcctggagcacggcatactcctcaatctctgtacacctatgaacgtagccaactccgagcctgccgcacagcaaccccacgcacagcccgataccgcagtcagcctggaaaaggtggtcaagaagtatcacgaccacaccgtgctgcacgagctctcgctgaagatacgacgcggggaattcctcaccctgctgggcccgtccggctgcggcaagacgacgctcctcaacctcatcgccggctttgcggaagccgacaccggcgagattttcatcgatggccagccggtgacctgcgagccgccgcacaagcggcagatcggcatcgtcttccagaactacgcgctctttccccacatgaccgtcgagcgcaatatcggctatggcctgcgcatgcggggcgtgggcaaggacgaaatcgcacagcgcgtgaagcaggtgatggacctggtgaagctggacggcctcgggcaccgcaagccgcgcgaactttcgggagggcagcagcagcgcgtggcgctggcgcgggcgctggtgatccagcccaaggtactgctgctggacgagcccttctcggccctggacaagaacctgcgcggctccatgcaggtagagatccgggaaatccagcgccgcttgcgcctgaccacggtattcgtcacccacgaccagggcgaggcgctggccatgtccgaccggatcgcagtgatgtcgaacggcaccattcggcagatcgcatcgccggccgatctgtatcagaacccgcaagacccgttcgtggcgtccttcctgggcgacgtgaacatcctgccggctcattatcacggccagacggcaacggatgtgcaactgcgcctgggctcggggctcatcagcttcccgcatgcccgcctggccgacgcatcgcacgatggggaaaggctggacgtgtacgtgcgcccggagcacatcaagcttgagcatctgcatgccgaatcggtgttgagtggcacggtgatcaatcacgtctaccagggcgatcacatcaatacgttcatagacgtggacattccgatgacggcccgtcaggtcgtcacggtgcgcagtgcgggcctgggcgccatgcagcaatggcccatcggctcggtcgcgggacttgcgctgcccgatgagggcgtcagcattttcagtccgcagaagcggacgtaagaacagatgcaagagcgcaacgcgaaggcgtaacacaacgcgtcagacaacgcagcctgagagaacacacccatgaccagtcttcctcgctccatgcaagccatcatcgcccgtgaacccggcgacgccggtgtgctaacgctggccgagcgccccatgcccgagcccggtgctggcgaagtcctgctgcgcgtgcttgccgccggcgtcaaccggcccgacatcatgcagcgtcaaggtatcgcgaagcccgcgcccggaatcaccgacgtgctcggcctggaagtctgcggcgaagtggtggcctgcggccccggtgtggacagtcagctgatgggccagcggctgatgagcctggtacccggcggcggctatgcgccgtggtgtacggcgccggtcgatcagtccttcatcgtgcccggcacgctttccgatgccgaggcagccgccttgcccgaggggctgttcaccgtgtggcacaacctgttcgagctgggccgcctgaccatgggtgaaaccgtcctgatccacggcgcagccggcggtatcggcacgctcgcgatccggatggcgcatgccgccggcgcaaccgtcatcgccacggacaacgacgaaagccgttttccggaactgcgcgccatgggcgccgacgcgacgatctgctggcccaccaccgatttcaccaaggcctgcctggagtacaccgatgggcgcggggtcgacgtggtcatcgacatcgtcggcggcgactatgtccgccgcaatcttgccgccatggccttcggcggccgccatgtcagcctgtccttcatgcaaggctcggcggtcaatgtcgaactgctgacgctgatgcagcgccaggtgagcctgcactcgtccaccatgcgcccccagagccattacgaaaagacccggatggcccagagccttgcccgccatgtcatcccgctgctgaaaaacggacgggtcaagccgcgcatccacgccaccttcccgctcgcggaggcggtcgcgtcccaccggatgctggaaagcggcaaggtcttcggcaagctggtcctgatcccctagagcctgtcatccaatcaagcatgctgaaacttcttttcgctccgacctcgccattcgtgcgcaaggtcatggtctgcgcacacctgacggggcaggccgagaacatcgaactgctggacagcgccgcccatccggtgcggcgcgacccgcgcatcgcggcccacaacccgctcgccaaagtcccgacgctgctcctcgaaaatggccaggccatctatgacagccgggtgatttgcgagtacctggccagccgggcagacgccgcggacatctttcccgcctccggccccgcgcggtggacggccctgacccgccaggcgctcggcgatggcctgctcgacgccgcgctgctcgcgcgctacgaacggaccgcgcgccccgaggaagtccagtggcccacgtggcgcgaagcgctgctgacgaaagtcagcgcctgcctcgagtcaatcgacgccatcgcaccggacctggcggaagaacagcccaccatcggtgaaatcaccatcggctgcgcgctggggtatctggacttccggtttcccgaactcgattggcgcgcccgatacggcaacgcggcacgctggaatgaggctttccaaagcctgcccgccatgctggccacgcgcccccacgaaggttgagataacagaggtcagaacatgagcgagaagatcaccatctggttcctgaacggccccaacgccaatctttatggcctggacgccaacaagacctacggcagcgacagctttccggtgctgcagtcacgatgcgagcaaaaggccgcgtcgctgaatgccgacctgcgcttcttgcagtcgaactacgagggacagctggtcgactggatccaggaagcgcgcggcgtggcggacggcatcatcatcaatgcggccggcctgacctactcgtcgattccgatcctcgatgccttgctgtctttccccggcaagatcatcgaaacccatatgagcaacatctggaagcgcgagccgttccgccaccactcctacatctcaaaggtggcggatggcgtgatcgccgggctgggcggcgacggctacgaattcgccatcgaggccgtcacgcggctggtgcagaagggcagagcagcggtctgatttccatgcgcacgcggaacggcagcaggatgtactctcgctgccgtccttgccattattctcaaggcagttgccaagatgccaatttctgaagacaccccctcgggcgcgctggctttctacagcgccttcgacgatttcgacacgtggaagcgcgcgctccaggcccagctcccgaacctgaaagtcattcactccagcaaaatcacccggccagccgacattcactacgcgctcgcctggaaaccgccggagaatttctttgccgaaatgacgaacctgcgcctgatcgtcaatctgggagcgggggttgattcactggtccagcggcaggatcttccccaaggcattcccatcacgcggctcacggacccgcagatggcgcgcatgatggcgggatacgtgctgttctccgtgctgcggcacgcccgggacatcccgtacttcgagcaggcgcagcggcggggtgagtgggcctaccgtcatccccgttctccggaagacatccgcgtggcggttctggggctcggtcagctgggcgcgaaagcggcccacgaactgcagcgccaggggttcaaggtgatcggctggtcgcgcagcccggcgcagatcgaaggcgtggaatgctttgccggactggaaacgctcgacaccgtgctaggacaggcggacattgtcgtcgtgatgctgccgctcacgccgcagacggctggcatcctggatcgggcgcgactcgagcagctgccgcgaggcgcggccttcatcaacgttgcgcggggcgcactggtcgatcaggcggcgcttacggacctgctccaaagcggccacattggcggggcaaccttggacgttttcgagcgcgaacctttgcctgccggggatccgctgtggagcatgcctaatgtgctgatcacaccccatctggcttcggtggcgattccgtcgtctgcggcgaggcagattgcggagaatattgttcgggtttctgccggcgaatcgccggataacatcattgatccagcacgcggatattgaggtatgggctacgtccggtgcaatgcgccggacgcgtggaagggatgagagacgcgatcaaaatggagcgaagcggttctggctagggggcgaagcaggggacttggatcgcgaggcgaattgttccaatgccgctgtgccagggtggcggcagacagtacaggtagtccggcgaggccacgcaacaatgacagatcattttgatcgcgtctccagcgtcagactgccgcttcttcctgctcacccgtatgaatgcggatgacgcggtcgatcagcgtcacgaaaatcttgccgtcgccgatcttgccggtaagcgcagctggcgcccgacctcgtaccgagtcaccttgcagtgagagccgccaagccgtcagtggaccaccttttggccccccgtgcgcaagttccccaactatgtcctaagcaaatggtcgaatcgatttgctgtagccgttccggatgcctgatgagaagaacccgccgcactccgcctttcgcgcacagggctcgcattctggtgcgtattcgttcttccagtcagagatggacttgacatatgctggctcgacatccgcattcaccaagcagagttgatggttatacacagacgtcttgagtccatagcttcttagaatcccgacagccgtactaagctccgtcttgtagtcggcggggtcgatccagagcgcatccaggttcgcgcgggtgaacccggtcatttccaatcccattagcgcgacgtggtcgacaaacagaagattccgggcaatgaattctgaaagcgcaggcagacctttataggtttgcttgtggaccacaacacgaatctcaactttctgattcaggcgtttcagattcaggatgcctcgaattgtttcatcaaaggccccttcggcttggacaacgtagtcatgacgtgccgggtcggccgagtagactgggatgcctatcatcacatcgggatgctgaactgctgcatattgttcagcaaacgccgcggcggcgaatgttcgcccgttcgacaggatgtgcagggaggtacgtggtagccagttcctaatttgatgaagcagatcgatgaatccgtcgccgaacagcgttggttctccgcctgtaatgcccagcgaacgcgtgttccgcggaatcaggcgaacggtctccatggcctcgtccagcaaccagcggtcatcaaccttcttcggtggctgcgaacacatcaagcaatagttgttgcactgctctgtaagcaggatgctgttgtggttggactccgcccggaaaagcgctctgatcctaccgtcgccggtcaagctgacaacatcgccctcagccaggtaagagaactcgtcggtcaacagggtgcaggggatgtcatcggtcaggctcgtcggccgttcgttgaacgcgaaatagtgagcgaagccggtgggggccggcacattagatcgggacaggtaagcccttgcccccctcaatgggagtggaagggcaggattcgtactgaggctgaactgccgccgaggtgccggcgattgcggctgtggagccttctcctcggcgaggcggataacgcgtcctgaaagtgttagcatcgattcacccaccgcatgaaaatttccctggctgcttcgtcattgcgcatcttatcgagcaggtacttggtaatccccatgacgcgcttgcagaagtcggactccggcttccgtccaagaacgtcgccatacatgccatggtgaaacacagggtcggatccacaccacggctcgaacgcacaatcgctacacattggtgcagacgccgtgaaggagtcttcgagggccgtcagtagcgcgtccgcggtgaatatttcctcgtaactgttctgatgaacattaccgatgcggaacgtcgtgtcgcccatctcacgcagcatgcggctctcgtcagacgcatagacgtcaccgtcgtagttaaacacgacggctgcgatgccggcgcctgcaggagtcatcagatccacaaagccagggtcttcggccgacatcatcttggtcagcaacagggtggagtagtactcggtgaagggcgttcctgccttgttgagggcgaggatgtagtccattccctctttgtagaattcgagccaccgttcggtgttgtaggcctgaaagctcttcgtcttgagcgcaaagccgtagggggagagatggcgcagaaaaataccgtcgaagccatgcttgaggtattcgtcgatgatgtcgcggacgcgattcagacttgccggcgaagtggtcatcagcgcggataccgagtcgtagcccaccatgtcgcgggcgcgcttgaggcctgagacaaagcgctcgtgactgtcccgaccgggacgcggccggttcttgttatgcaggtccgccgggccatccagggaggatgacaggaagatcttgtggtcgcgacagaactccagaatctcatccgtggccagcgacaaggttgtggtgataacaaactggagatcccggccttccactttgtttattttctcagcctttttcactacatatcgaatcagctcgaagttcagtaatggctcaccaccttgaaactcaatttttatagcggggttcggggaacggaaaacgaggtccaaagccttgtccgctgtctccggtgtcatatcgaaggccgctttgttctccgactggcgagagacttggcaatactggcaactatgatcgcagcgtaacgatgcgacaaatatgtgcagattcgtgaagttggaaagcttactaaacttggtccgcgtcttcagtgtgagcagttccaaactagcttcgtcaccggcttcacggaggaaatgccgggatctcagcgtaatgtagtcggggtcgctaggactcaaacgatgcgctacgaggtcctcaagctgccggcgagataaaaaagcaaactcgccgacggcattcgtggccaccacattttcgttatccagggcttcaaaccgaaacggtagtaactgatatcgccccgcattcttgctttgatagctctctaggctgcgaaacttattcattgttgcaaccctgtgcgcgagaacgcgtacgctaaaatcaggtttctcgctgcctctgtttcgttttttatttgcaggcggagttgttggtcgaggagttcacgtttgaagttggctagaacgtcttccagtggtgctgcgatgcccccgaccaattcaatttcgcaaactacggaggtcggactttgcgagatcagcaccgtgagccggtctatgaatctgtatgccgccttttgtaccgcctccaggcagtagacggcggaatctagttccaaacgtgttgtcatggggaccttggaggagccgacccacgaggagtcggctatgaaatgtgtttgtttctgcttagtaccggctggagtagtgcgacgaatgcgaccggtgcgacgaatgtgatgagtgcgactgatgccacgccatcagctttccctcatgggcgtccgagcgcttcaggatgaaattgaagacgtcgccggcagagtctgtcactgcgattctttcgagagatttggcgtcaatcgaagtggtcgatgaagcatcaaccgaatgtgtcggcgcttgcgacggcagctgcgctgcagtggcgccctgcgccgcaaaacctgcggcgactgccgcaaatgttttgaggaaccccttcataccgtctccctttttattagtccgcctctctagaaattcagcctgcggatgtataacccatttgagttaaattcctcccatttgtactaaatgggaggcaaggcgtattggccgtgtaaggtcttggtacaccttgtaaggaagtgtaacatccgatttttgaattggcggcataaggtgctatgtgtgctttgttatgctctcgcacatgtggtttttgacaagaatcctaaatcgaaagtggataccgaggcgctttggaagttctgcgcttatgatcgatcgacgtgcgacatcggaagcccatcccgagtggtacctccgaacctttggcgcggtccggccaactctggacagaagtgcgggggttggtcgtggatgttcaccagtccgaggcaacggggattccaacgagatcaaatacgtcagcccgacccattggccacaggcggacgaggggaagatgaatttcccgggttgcagcccctatcgagtgaatatgctaactgacagcaaagaggttttcaatgcgaaggcaaatgctagtcctgcgtgtgggaattgaccgtgggggcgggaactattaggagccccgatttgcggatcgcagttttgagtacacattgattccggaatttaaggttcatcgctgatttccgggaaggcacagatcggccaagagctgtcgccaccgcaatttgcgatgattcaacgggcgcgcttgccgtcctcggtggccgtagtgcatcatccctgccgtacaaatccacaagcgccttacggagctaacgcacatggcgtactcgaagtccaggaccagtctgctgattgcttttctcattgcgagcagcgccactttcgcgcagcatgaggtcaatttccacgaccccatcaatatcgaaggccacgtgtcggaaaaaaatggcccacaacatgcaggtggagcagaaaagggtggcccggagggcccacgcgacaagccagctaacggcccaaccaccacgattcaggctcaacccattgatgtagttgcggaaatgtcccgcggtcgaatcagcgggaaggatgctgttcctgtcacggtgggaggcgtcacctacatggtgtcgcctcaagcaaaggcggacctgaaggaatttatcaagacgtacaacgcgaccggccacgtcggacagcttgtcgctgcagccgcaacccttttcgcaatgtttggactcgtcaccgagcccgatctgagtcagatcgatttcaacatcgacgagactgtaatggtgctgtcggcgccttcgatctttgcagcagcttggcgcgcccaggccttggactatgttcgaggctacatcaatcccagccgcgcccatacccaagagggtcgcatgtggcagcggatggaagatctgatccgcgagccggggaggtatcgcgacggcggtatcaagcgggagccgaatgggcaaatacaaatgcgcgcgctgcccgcgcagcggtatcgcgatgtgccaggcgactatcccctgacgcaagcggacgaggtcgaactgggacggctgatcgatagcctgcgacggaaccccattgccatggactaccttgctaaaactgacgccgtgttgggcatctatacgcaggacccacaaggacggccaagactgtccgcacgagaccaatacctcatgaacatggcgctactgcgactcgcgccccaagagaagacacaactcgcacaagcattctggcgaaacacgcagtttccggccgcactcacgccggcattctggtcatccatgtcggcctacctgcagcgtgaggaatgggatcgcaattcgcacatcgcaatcctgcgtcacatggcgggcttcagcgacgaccttggctttccggacgagttgccgaggtatgacgatgggttctggacgaacatcgcaccagcagcgttggcggccactgggccgatcttcgtctttccccagcacggcccgcaggcttggaccttccactatcccggtcccggaggccagtagcaacgcgtgcgattcgcccggccggagtagcggaacgatcgagttcgtcgactacctgcagcctccgctataccgcgaaggcgggtccttccagcatcgaaacggcgtagggcaacggacggcggccacctttggcaccatcttgcacgtctccacgacgtgtgggtccaagcgcgcctttgtcacagtctgccgtcagagtgcgtccagcgcgggccgcgggctgctttgggtcggattcggccggttgcgacgtcaacggcccaggcactctcccagagacagtaagatcaatcacgcagatcggcgaagatccaaaaaaaaaccgcagccgaagctgcggttattccttcacgccggagcaacacccccggccacatcagcaccaccactcactccaccggacaaatctcccccgccgtccggtcaaacttcgccttaatcatcgccaccagacaccggataccaaagcaagcatccgaacattcgctttccacttccaacagcactagcaccctgtccaatccagcactgatgcaattcagcgattcgcgacaatcttccggattggcgatcaagacggtttgttgtttcgacgcggtttgctcttccattgcgaactcctatcaaagttggaagacccgcctgatggataaaaatgaagggtggcgggccagacagcgggggtaccaaaccggtcttcacagagtaatccggccagcctttcggctgccccgcccggcccgccaaaaactgaggagacgtggacgcgcgaacttggccgtatgagacggccgtctgtaaagatccgggttggtacgcccgatcaccgttgtctcggtgatggctccagtgttcccatctctgtcgtctgtggcgatcagacgattcgcaatcttccggcgcttcgctgtcaggcagttgcctagcgaatcctgtcgaacccaccagcagcccaacgctctgcgctgtcccgcgtcagccgaaagtcgggccgcaccttcacagtcgccagcacatcgccgaaggaatcctcagccgtgagcgtgccaaagggctcgaattcatccggcgtaatgacgagcttcacaatcacagtgccggattcagactcgatactgacctgcttgttgagctgcgcatgcaattgctgctcatgccgccggataacctctgaagccgtcttgaccagcgtctggtgcgcagtggcatccagcggcttgggatcgaccttgtttcgccccatggtccagggaccgaccagcgcgggctcggcgctgccgccgcggatcatttcgactgcccagccgtcgccgtcctcgttcttgatgacgcgggcggtccagcccttgtcgcgccagaggcggggctcgtggatggcggtggattcgtgctcggaaagggcgtcgtcggtgtggtgcatcaatctcgtggtacgggtcggggaacccgcgaggatactataggggccgacaggcagcgttcggccgtgcgtgtgggcgcctggcaggttgctgaaagaccggccggcggcggggttgctcccctcttaaatgagttccttcatcaagcgctcgacagtcatcggtcgattggaattcaggagcaatgctcgcattgcggacgcaccttcaggaacatgccggaaggtcatgctatccctgatccttctcggacagcgcgctttccagtagctcacgtgcctcccttccatgaagccaaatgcaacgcttccattcttcggtggctccgtgccttcctaaatatgcctcgcgctcttcggcggttaaggattcccagaatgaagaccaatagttatcccaccaatattcaatgtcgccttgcaggaatcccagcttaagcggttcgctaatctctggaaaggcgacccacggaggcggtggacttgagttggccactactatgcgatccaacacggaagtatcgttggtcatcattgatactattgatccagaaaattcattactgaacgcaatggagatgaaaaaatctccagcctcattgccgctgcgtcttatatacaagtgctcatcaactttatcgaatccgtttttaatgccttcgataagctcatgtaccttattcgactccagttgaaagtgagcgtaaaaagcatttatacccgttccgggtaataagctggaaatctcagggtacctagaaggcctcttttcagtcgctgatattggcaccatatctagcggacgagaaaataaacctttcaattcttccagcgagcggccgaagcgtgctcggagggctcgattccgctcctcggcgatacgcctgtgagtcaacatgtcgcgcaatttcttgagcacttatctcactccatttgatcgaccacccagtccgcgcccgaataacctaggcttccgccgatgatgccatggctagcgccgcgccggcagtagccggggcgcttgcgctatcgatcacgggacagcccatcagggtgccgttcgcggccagcgtcggatacgcatatgggtcttgcgccgtgcgacagtctgctaggcgcggctgaacatcgacttcctgataatggcatgcacgccccagttgccattcaccacctgcgtgataccaaaatccactgcaacagagatcagcgcaaccgcctcatcttcactcagccccttgaccgacataaggaagcggcgtgtcttgcggaaggcgtcgcgcatggcgtcgtccagggtggacttcaggtagatatggctctgcgccatctggcccagttcagccaggtggttgggcgagctgaagccatgcaggatccattcgtcggcggtttccaccagcgggtagctcaggtcggcgaagggagcgtcgcggtcgatcatggtgctcttgtgcaggacgagctggaagtcaccggtcagcgagcattcgatggccgtgccgcacagctcggagtctccctgcgaggcatggggatcgccaatcgacagcagggcgcccggcacggctaccctgaggtagacgctggcgccccgggtgacgcgccagttgtccaggttgccggcgaagctggagggcgggatggagtcgatcaggccgtcctgcgccggcgccacggcgatgacgccgaagtgggggcggaccggtatctcgatatcgcgcagcacgtcgtagttcttgacgatggtgtcgtggtcgaccggcacgccgggatagtcgatggtcgggtgcagcacgccgaacggatcgcgctgcggcgtccagcggaagttgtagaccgcgcgcgcacggctgtcggcgcgttcgcaatcgatctcgaagacggtgaccacttcgcgctcgcgcggctcggtcagcatgtcgcggtaatgaaagccccaccaggtcgcggcgttgctgccgaaggccctgccggcaaagcgcgggttgcagcacgggcgcgggcgcacgtccaggatgcgcacctccagcacatcgccgggcatggcgccgcgcaccgcgaccgggccggtgcagatatgcacgccaaagccttcgccggcgccgcggccgtagaccgacgcatcgatggggcccgcgccgcgccggttgacgttcttctgctccgcggtccagtgaaagacgctttcggcgccggcgtcgccgtcgatcatgcgttcccggtcgtcagaggcgtgctgcgtcagggtttcgatggtgacggtgtcgccgggcatgacctcaagcacgggcggcaggtcgtggctgagatagccccagtgcacggtcttgtccgtggcctgcagccagtggtgccggccttccgggcgggcggcgtgcgagcgcgcctgggtgatggggacgatggtgggcgccgcttgcaggcgcgcagcagggccatcgttcgcgggcgcgccatggctagcgggagcccgcttcgcattggccggaagcccgcgggagacattctgcggtgggcgatgctcgggcgtgttcgcggtctgctcacggtaggcgcggggcgagatcccgaactgttcgcgaaacgcgtggctgaagtgcgaagggtcgttgaagccccagcgatagcagatgtcggagaccgagagcttgtcgtactggtggttcgccaggtcggcccggcatcgctcgagccggctggtgcgcaggtaggcggaaaagctgctgccggatttctcgaagagcttctgcaggtagcgggccgacatgcgctcgtccgcggcgatggcggcgaggctgagttccggctcggcaaggcgtgcgtcgatgcggctgcagacgcgcgcaaaaacggccgcgcgcgagggcgtcatgtccggcggtgcgctgggctggctgtcggccagcgcggcgtcaaggcaggcggtgatggtgttgtcgaagggctggatggccttggcgtttgcggacacgatggtgtcgaagctggccgccatggactggagcaggcgggcaaacagttcagcggcgtcgccgctcagcaccagcgcggagcgaggcaagggggccgtgatgcgtgcgctcagcaatgcctggccgatatgcacgatcagcatgcggaagctggtggccagggccagcctgcgggcggcgtgttccggcacgcagaccacctgccccggccgcagcggttcacgcagttccggcgcagcgaggtgcgcttcgccttcggtcagcatcagcagcatcaggccgcggccgtcgccgctggtgatggccagcgtctgggggaccgatgcaatgcaggtcagctcgatgcccgcgggggtggtccgcgactcgatcgtgccgtgcagggtgtgatcggcgcacaggctttcgcaatgcaggcgtgcggcgcggagttcgtcacgccaggctgcgccgcgccggttgtgtggataggcttcggtggaaaaacgcaaaaggtgcaattgaacctccctggcatcacgctgcaacagcgaaaacgggcggacattgctgtccgccgcgcatccaaagcatttcctgcgaaggccgggccctccgctagccgaacagcaactgcccccgcatcgcggccaccagtacgaatcccgcgaacgtgccaaagatggcgaagatcccgccgagcacgttcggggccggtatcggtgcacgtaccgcagtgtagataacgccggtcaccaagccaacggctgcggcctgcagctcggtgctgcccaatgcaatttccaccatgtcattccccaatctcatgagttgcgcgtgattcagcggctttccggcggccgcccgaaggcgatggtcctgcgccacgcgtgcacgatcagatagccgatgtaggtgaagaggatggcgcagatcccgccggtgacgtttggcgcggggatcggcaggttcagccaggaatacagcgtgccggtgaccaggccgacaatcagtgcaaccagctcgttgcgtcctatgtagacgtattgcatatggcgctctccctttgtattgagttgacggctcagcccttgtccttgggcgggaagatcgagcgcggcatggtgcaatggatgccctgggtgccatcgacgacctgcgtcacgccgaagtcagccgagacgctcatgagcgaataggcatcgtcgcgcgagagtccctgttgctcggtcagcaggtggatcatgtcgcgggccgcgttcttgccggcttcatccaggtcttcatggaagccgtggacgacccagcaatccggcgtttccagcagcggcgaggggaagtggaagtccttgcgcaggaccacctggaacaggacgttcaatgaggcctcgatggcggtgccgctgatctcgccgtcgccttgcgagatatgcgggtcgccgatcgagaacagcgcgccgtcgacctggaccgggtagtacatggtggcgcccgcgccgatgcgccagttgtcgatattgccgccatgcaggccgggctcgacggtggtgacgcggccgcgcgcgtcgggcgcgacgccagcggtgcccaggtgcgggcgcacgggaacccgcacaccggccagcgccggctgcctgcagcattcccgctcatccacgagcttgccggggatggtcatcttgccggggtagtcgaaggcgtacagggcatgcgcggtgttggagcgctggtccagctcatagatggtgacccgctccttctcgaactctttgtacagctggccccagtgcgccgcggcattcgccccgaaacggaagcgcggaatcatctgcaggtagcgcacctccagcacgtcgccgggcttggcgtcttcgacatagatagggccggtcatgatgtgcacgccggggttgcggtcgtcgtggggaatcgcccggaagatctcgcgaatggcgtcgtccatcatcaggtcgggggcatcgccggcatggtgggttaccgcttcggcgcggatgaggtcgccgcttttcacggtcagggcgggcgccttggcggcatcgaagtagccccagtggacggtctcggggcgggcgggcaggtcgtgcagcatgttgtctcctatgttttcttgcagccgtgtccgcagccgttcacccggtgagcggctggattcgatgaggtaatcagggacactggctatgcgtggcaggcggggtatgcctggtaccgcgcggcagtcctgctggcgccgcgcggtgagtcaatactagggacagggcgttgcggggcagtagggcgattcaccccaaactcttgtgttgctgcgtactaaggtaaacccgctgcacgatgccgggtcgcggcgggctgttaattcctggttgacatcgtgtcaacgatctatggaattgtcgacaacgccttgacagtgcggaagcccggcagagccaggggctgatgctgaggatggcaggggccctgggcatggatgccgcgcaggttgcggggctgaaggccgccgggggtggtgtaagtcgctgtgcggcgccggcgcaatgccggcgcctgctattgctattgcgatggcgcctcgggccatttccccttgcggggaaggcgcatatcgaactcggtgaacacgtgctcctcggagcggcagctgatgcttgccccccagctgttcagcaccttctggcaaaacgccagtccgatgccggtgccgcgatgtgccgggtaagagaagaagggctggaacatccgggccagcacttgcggcggcacgcccgtggcggtgtcgcggaacaccacatggacggcgtcgggccggacctcgcagcggatatggatggtgcccttgccggcccgcttggtcgcttccagcgcgttcttcagcaagttggtcgtgaccagcccgaacaactgggcgttgcccatcacgtaggcggggccaggcaggtcgacggtgaccagatccaggtcgctgtgctcgaacggaaaccggccgacagcgtcgcggatcacaccgcccagttcgaacagctcctgcgtggcgttgtccgggttcttggagttggcgaccagcagttcaatgctgttgctaatatgggccaggtctgattccatccgggccacggcctgcatcaggccgtcgcgctgcggcgtgtcctggtccagggctgccggcagccgcgccttgaggcccctggcagtcatggccaggctggtcagcggcgtgcgcagttcgtgcgcgacggtggccagcgcggcggccatcccgcgccgcttctgttcggccagcagctggcggtccatcttgatcaccaccagcaccgcgatgacaaagccgatcaccggcagctgcagcagtaccggctcccacgggattccgcccatggagttgcccgccagcacgaacagcgcaatggctgctgcggcccctgagaacaaggcaatggtcgcgaacgcggtgttgaagtgatacaggatcaccaccgcgatgatgaccgattcggcccacaccatggagccgccattctccaggtagaagaagataaaggcgaacggcaggcctatggtaatggcaaagagtgcatagggcggcagccagcgccggtccgagaaggcggaggcgaacagcagcggcacgaacagcgcggtgcagaccaggcgcagccagaggttttcatagggctgcgggaagatgtaggaccagatcacgtagtacagcgggtgtccgatcacgcccagcgcccccaccatctggatccggcgcagccggatgacgctctcctcgtccagcagcgtagcccgcgcggcggtctcgaatacagtctgccacgcatcgcgggcgacgccggcaagtgaggtgcggccgtcttccgcttgcgctacctttgcatccatctccaggactactcctcgcgggagcctgccagcgacccgcttgtgggattttgagacttgcgccgggcccggcgcgtcgaggaccattcatccagccggacttcgtcgcggatgctggcgagcacgccgaccaggcggtcgatttcattggcggcaagtttcgcatgcagcgtaagtcgcatcaatgcccgattcttcggtgttgccggcgcacagaataccgcgccgaagatcccgcggctctgcagcgcatcgcgcagcaccttgacttgcggctcggttcccgcctccaggccgatgatctgctcggagccttcgctgatgttgtagcccagttcggcaatcgcagcccgggtgtcgcgagtgatggcgtgcaggcgcgcacggcgctcatccgccgtggcgacgaaatccgtcacggcatcgaaccacgcaacctcatggcgcagcagcccggaactgaaaatggccggccgggactcaaccgcgaagaagtccttgaagtcggtcgaacaggcaacatagccggcgcggccggcaaacgccttggccagcgaggccgtgcggaagtgtacgcgctcggacagcccgagcgcgcgcaccaggccgccgccagacggcccatgggtgccgagcgagtgcgactcatccaccaccagcacgcagccagacgcctccgccaggtcgacatagtcctccagcggcgccacgctgccggtggtgctgtagaccgagtccaccatgatcacgcccgggccgaagcgctcaagctggcggcgcacgtgctcgcaatcgttgtggcgcaccggcacggcctgcgcgcccgcggcgatgatgccctcccacagggaggcatgcccgttcatgtcgatatagaccggaatgccggggccggcaatgcactgcaccaggccgacgttggcggcccagccggactgggcgatcagcccgtcctcggcctgcatcaggtctgcgatcttgcgctcgacgcgccgctgcggggtgtcgccgtgctggaacacggacgacatcagcaactccggctcctcattgaggaaggcccgcgcctgcgcctgtaccagagaggtctcgccgagcaggcagagatagtcgttgctgctcaggtgcagtgcatcgggcccgggcgtgcgtccgtgaagcagatgatcgccgccccagagcttgcccatccgctcgtcgaaatgttgtgccatccgcgccgtgatccatggcggcagcgtgggggctttggcgcgagaggcgtggcgcatcgagtgcggaggctcggcttcggagaacatcggctttccttctacaggtcgggtaatcagtgagatcggtggcaaggctctgcatggcggttgcggcaaaaagctgccgtccgcgcgcgacgcggccgcacccagtccttccggcgaggtgccattgctgacaagtcgggggagtcctgttgacgtagcgaccactgtgccagccttactcagcgattgtgaccggacttccaccaatccaacgtccgtttggagtggggggtgccgggttgagacagccgcgtcgtggccgcaccttcgccggccgataggccgatttctcactgtaaaatgcctttagcatcacttatgtgatgcttgcgctacctgctgcgccggtccgtgaagcccggaccgggcgggctcgcgcttggcgggaccttgtcaggcccgggactgccgaatgctcatcatcagttttggtgaagaatgccctttttgcacgccctgtttacaggcaggcgcctgcggcagcgcgccatagccaggaagcggggcaacatgggacttggcaccgagggcgggagacaaggggactgccaggtacgcaggttgccgccagcgtgacctggctggcggcgtgtgggggaggggggcttcggagagagggcgctgcccatggcgcttccaggctggtgcctttggcgcaggggtacagggcagcagcgtgctgcgacgcttgtgtcgggggcgccttacgcctggcctgcctcgtcgatcagcgcggaaacgtcgacgatatacatctgccgctcggagtcgtggatcgaatcgatgcacacgtgccgcccgtcgcggctccagcgtggatgcaggtcgcagcggttttccttcttcaggaccgggctggtgtagtaactgcccaggtcatggcgcacgccctgcgccatgtcgaagagaaacagcacgcgctcgttggtgtgcgcgtcgggataggtgtcgctgagcagccagcgcttgttggtgggcgagaaggtcatgtgaccgttctcggtcaggatgccgtcgccgatgacttcaaccttgccgccggggctgtcgtggtagaggtggtagtggatgctgcccgcgtgcggtccccacacgatgatattgctatcgtcttgccagagcggatgggagatctggtactcggacttctcatagtcgaaggtgccgaccgcgttcggatcgaaatcttcggcaagctgcggcagcggatggtcggagcattcgagcaagcgcatgtcgctgccgtccggattgaccgtgatcagccggtgcaggaagcaggtttcgtcctcgacccgttcggtccagcggtgcagcagcagcacgcgcgatgaggacgggttaatttcgatgtggctgacccagtggatggccttgtccatcgaggcgcgcggattgaagttgcgcaggtcagcgtagctcacgaccaggcgcgtctggccggtgcgcaggtccatgtagtggatgccgtcgtcggcgggcgcattgtccagcgcgggctgggtgccgtggtcgctgtagccgatggtctggtgcgtgacgtagaggcggcggtagtccacgcacagtgcatagcggctgtccggcgcgaccacatagaccggcatcggcaactggcgcgcttcaccggtatcgaggttgaagatggtggcgcccaggttgggatagaaggccttcacgtcctgggtgcggcagttgtagacaagctggcgctgtgcttccccatccagccattgcagctgcgagcccatctgccagttccaggcggtagttacccccacgcgatggaagcggtcgttgtcctgcaggtcgaagtagccgatctcggcaaccaggtcgggggtcaggtcggcatcggccatcggcacgcgctgcgccagcaggtagcggccgctgcggtcccagttggtcttgttgtagtagccgaagaagtgatgaggctcgcccgcgccgacgcggcggcagggcagcggcttggcaatgatgcgttccgttgacatgaagcgtgtgtgtccgtgttgaagctgaagtctggaaggggcaatggctggccgcgcggccagccatgaagggggcgtgtccgtgcgcggatggaagccgcttattcggcgctgatcctgcccttcaggatcacctggtcccagcgcactttctccgcggcgacgaacttctgcgcggcatcgcgcgtattggccaccggggtcatgccctgctcttgcagtccctgccggaactccggcgtggccacgatctggcggatatcggcgttgagcttgtccgcgatcgcatcgggcaccctggcgccaaccgcaaccgtggtccaggaagtcgccacgaacgacgggtagccggcttcgctggcagtgggcacatcgggcagcgcggccgagcgggtcttgccggtcaccgccagcgccttgagcttgccggagcggatataggccagcgtggtgggcggattctcgaacatcatgtcgatctggccaccgagaagatccgtcatggccgctgagctgcccttgtacggcacatgcgtgatcggcgcattggcattgagccggaacagctcgcccatcatgtgcaccgaggaaccgacgccggccgagccgaaggtccgcgtgtctggctgctggcgcgccaggctggccagttgctgcaggttgttcaccgccagcttcgggttgaccaccaccacgtgcggcatctcggccagcaccgtcacgaccttgaggtcggtggcggggttgtagttcagcttcttgaaggtggcataggtggcgtgcaggcccagcgagcccagcagcagcgtgtagccgtcgggcgccgcatcgaccacggccttgcccccgatatggccgccggcgccgggccggttctcgaccaccaccgattgcttgtagagcttgcccagccggtcggccagcatgcgtgcctgcaggtccgagctgcccccggcgctgaacggcacgatgatccggatcgtgtggtccggatagcccggctgggcgagcgcgctgcccgtgccggcgatggccagcacggccgcaacgatcgcgcgtttccaaacattccggggtgaatgccgcttcatcaactttctccttgggttctggtcctgccgtcttggaagcggcaatgcgaagcgagtgtagaggaggggttggcattctgaataattctttgttcaatgcaccctatgcagatttgatatacattgcccgacgcgcccgtcccttgccgatgccatgtcccgtcccctgaatttccgccagatcgaggcgttccgcgcggtcatgctgaccggaactacgaccgcggccgctgccatgctgcatacgacccagccgtcggtgagccgattgctggcccagatgcaggcggcgactgaactgaagctgttcgatatccagaagggccggctgcggccgacgcaggaagcgcggcgcctgttcgacacggtgcagaaccacttccaggggctggcgcggatcgaacaggacgtggcggtgctgcgcaagtccggcaccggcgtgctgcgtatcggttgcacgccttcactcgggctgggggtgatgcccaaggtgatccggccgttcaccgagcgccacccggacgtgcatatcagcctgcaaacggtcggcgggcaccagttgcgcgaagggttgctgcatggcctctacgacctggtgctgaccaccagcgagatcgatcatccgcacctggatgtcaacgtggtgcatgagtcgggggcggtgtgcgtcatgcacccggaacacgcgctggcggcgcgcgacacccttcgcgtgcgcgacttgcgcgggcagttcctgatcctgctgaacgcagacgatgcgctgcacctggcggtgcagcggctcatgcaaaaagccggcgtcgagccgtcggcgaccatcgagaccacttactcaggcacgatctgcacgatggcggccgaaggggcgggcatagggatcgtcaatccctatgtcgcggctgtattcggacacggcttgcgggtggtgccgctcgcaccgcgctgcccggtggaggtgcgcatggcgttctccgggcattccgcgccatcggagatcgcggaggaattcgcggcgctgctggcggcgcattttcgcgtgcgctcgccgctggcggagaaggcggggcgggggcggggctgaaggccccggggcagtcgctcagtccagcgacacgccgagcttgcggatcagttcgccccagcgcgtacgccccgcggccagccattgcgctgccgccgcgccgttgctcgtctgcggccgcacgccctgtgccagcagcttcttctggaaatccgcgtccgcgaagacggtcttgagctgctgctcccagcgcgcacggatggccgcgggcgtgcctgagggcaggaacatgacgaaggcgaactcggcatcgaagttggcgatgccggtctctgccaccgtcggcacgtccgggagcaaggggtcgcgcttgaggccggacaccgcaagcgcgaccagcttgccgcccttgatgtattgcacggcggtcggcgtggccaggaatcctgccggtacctgacccgcgagcacgtcgctcagcgctggcgcattgcccttgtaggggacatgggtgccccggatctgcgtgcgtgccttcagcatctcgaacacaatatggcccggcgatgctacgccagccgatgcataggacaggtctttgtccttgccggcagccaggaactgcttcaggtcgcggattttcaggccgggatgcgtgaccagcacctgattgaaggtgccggccaggccaaccggctccaggtcgcggaccgggtcgaacgacatcttgcgataggcgaacggattgacggtgacaacggtgtcagtcgacatcagcaacgtgtagccgtccggcgtcgcatgcgcgacggcttcggcaccgatgttgccgccggcgccggagcggttctccaccacgaccggctgcttcaggtcgcgcccggcacgctcggcaatgagccgtgccacggtgtcgagcgggccacctgcaggaaagttgacgatcaggcggaccggcttggccgggtaggcatcctgcgcgcaggcggggaccgcggccgccagcatggctgcggcgatcagtattctgaagggacggggtgtcatggttgtctccgtggatattgttgtcatggggtgctgccgctggtggcgcgggcggacccgattcaggcaagcgcggtcggattggggctggcgtcgctgtgcgagatcatggtgaccagcagctggtgcagcagcgcctggcgcgtgcttgccagcgctggcgcatcccacaggttgtgcgattcggttgggtcggtttcaaggtcgtagagttcgccccacggcgcgccttcgtacacactgagccgatagcgcgcggtttgcagcgtccgcatgcgcgtgcgcatcgggaagccgaacatggtgcgctggttctcttcctcgatcagcagggcttcccgcggcaatgcctcgccggcgatggcgggcagcagcgacaggccttgcatgccgttgtagggcgcgcagcccgcgcgcgcgaggatcgacggcgcgatatcgatgctcgagcacagtgcctggctgcgcgcggcgcgggcatcggtggccgtgcgcgctgcgggttccgaccagatcagcggcgtgcggatcaggccctggtagtgcagcggccctttccagagcaactggtgatcgccgaagaagtcgccatggtcgctggtgaacaggaccacagtgttgcgatccaggccgagcgcggccaggtgcgccatcacgcggccgatggtgtcgtcgatatgcgcgatcgagccatagttcagcgccagcgcttcgcgggcctcgcgcgccgtgcaggcgaacatcgccggcgtatgcttgacggcgcggccggcgtcgcgctgcgcgtgcatccagcgcaggtgcggcggcgccagcgccggatcggcgtcgaacgagggcggcagggtcatgtcctcgggccggtacatgtcccagaatcggccgggtggcgtgaacgggtgatggggatccggaaacgaacactggatcatgaagggggcgtcctcctgcgcgtattgcccgagcaggtcaatggtgcgatcgccgatccatgccgtggtcgacagcgtttccggtacgcgcgtgcgccaggcctgccgcgcttcggccaacacatagccaggcgtcgggatggcatgctcctggccgcaggcacgcgctacttcgggatggcgctgctccagccagcgccggtaatgcccgccggccgtgtcgccatggtcggtcaccagctgcacgtcggcaaagccgtaatacggcagggacatggcgaagtcaggatcgtcgcgccaggccggtccccattcctggtcgaagcgcccgctttcaggccggcgcgcttcgccctccgtgcgcggatcgccgggacgtggccagacgggcgcaaggccggtcatgttctgcagatgcgatttgccgaccagccccgtgcgatagccggcatcgcgcaaccgctcgacaaacgtcgtctgtgacagcggcaagggaatgccattgtggcgcgcgccgtgtaccgacggcacgcgcccggtcatcagcgatgcgcggttcggcatgcagatcggcgaggccacatagcagcgctctgccacccagccgtggctgccgagccggtcgatattgggcgtctgcaccacggcgttgccatagatgccgagatggtcggcgcgatgctggtcggtgatgaacagcaggaaattggggcgggcgctggcgggaatgctggacgggggcatggcaatggcggcttgcgggggatggaaaaattattgcatcgtccgcgattccattgaaatgattaatatgacctctgctataacctgaaactcataccatggactggacccaacggatgcgtatccgccagctgcatgtgctggtggcgctacatgaaacccgcaatgtcagccgtaccgctgcgcgcctgaacatgacccagccagccctgtcgcgctggctggccgagctggagagtgaactgggggtggcgctgttcgagcggcattcgcgcggcctggtgccgacccgcttctgcgaagcgctggtcgtacatgcccgcaccatcctcaatgagatcgaacgcacccaggccaccattcgcgtgatggcagaaggcgcggctgggcaactggcgatcggcgcgacgccaaccgtatcggtcgacctgctgccgtcggcgatcagccggttccgcgagcgctttcccgatgcccacctgacgctggcagagggcaccgtcgaagacatgctgccggccctgcgcgaaggacggctggacttcgtcatggggcgtaccgaagtgcagggcatcgacggcgagctgcgctgcgacctgctatatccggagaccatccgcgtgatcgccggccccacgcatccgcttgcgcgcaagcgcaaggtcgggtgggcggatacgcgcgcctatacctgggtggggccgcccgtgaccagccagatccggcgcgagctggactacgaactggcactggccggcgaacccgccccatgtgtgcggatcgagagcgcgacgttgcttgccaacgtgtcgctgctgcagcagggagaactgctggccgtgatgtcaggccggatggcagcgttcttcagtcgcctggggcaggtggcgatattgcggctgccataccggcgcgagggcatggtcggcgtgctccggcgccgggacaccgagcagacgccgctgcggcaggcgttcatggacgcgctggctgccagcgcgcacggatagtcagatagtcagcaaggacgcaatccggctaccgcgccggttgcctcgcatctggctcaggcccactcccctccagcgccgccccacgcgcctccatcgtcctgcgcgcaatattgagctggtggatctgcgtcgtgccttcatacagccggaacaaccgcacatcgcgatagaagcgctcggccacggtgcgtgccatatacccgctgccgccgaacacctgcaccgcgcggtcggccacgcggccggacatttcggaggcgaacagcttgcacatcgacgcctccatggtcacgtcctcgccggcgtcgcgcttgcgcgcggtgtcgagcaccagtgcgcgggcggcgtgcagttccgtattgctgtcggcgatcatctgctgcaccagctggtagtccgcgatcggcttgccgaactgccggcgctgcgccgcgtagcggaccatctcgtcgaccagccggatggcgggccccacgcacaggccggccaggttgatgcgctgcttgttgagcgccttcatcgccgtcttgaagccgacattgggtttgccgccgacgatggcgctggccggcacgcggcagtccttcaggtagacatcgcccaccggcgagccgtgctgtcccatcttgcgttccggttcgctggtgctgaggcccggggtgccgcgctcgatcaggaaggcgctgatgccatgggctcccggtgtatcgggattggtgcgggcgaacacggtgaacaggtcggcgatcggcgcattggtgataaagcacttgctgccgttcagcacgtagtgatcgccgtcttgccttgcggtggtttgcagtgatgtcgcatcggagccggcttccggttcggtcagcgcaaagcagccggtcaccttgccggaggccagttgcggcaggtagcgctgccgctgcgcttcggtgccgtcggccaccagcgattcggaggcgatcccggtattaccgccgaagcgggcacggaacacggtggcggcctgcgagacctcgatgttcaccaacgccagctcctcggtggtcagccctgcgccaccgtacgcttcggggatgctgtggccgaacaggccgaggcggcgcatctgttcgaccacgggctcggggatgacatcggtgcggtcgatctccgcctctagcgggatgcaggtttcgagcacgaagcggcggatatcggcaagcagcgcttgctggcgggcggagtcgcggatcatggaatgtttccggtaggttggatgagcgtgtgcggctactgtgccgtgatgccggcggtcttcagcacgccggtccatttcttggtttccgtgtccaggaagcggtcgaatgcggcggtggattgcggtgccaggtccatgccgagttcggccaggcggcgtgccgtggcggggtccgcggtggcctgcgcggcggcctcggccagcttgcgcaccaccgcgtccggcgtgccctgcggcgcgaccaggccgaaccacccgcccacttcatagccgggcaggcgcgcggcctcggccacggtgggcacgtcgggcatcacggctgagcgttttgccgaagtcaccgccagcgcgcgcagcttgccgctttgcacctgctggcgggcaatggccgaggtcagcgccatcatcgagacgcgcgcgcccagcaggtcgctcatggcctcgggctggcccttgtagggcacgtgggtgagcttcacgtgcgtcatctgcgccagcagttcggccgacagatggttcgaggtgccgacgcccgcgctggcgtaggtcagcgtgccgggcttgctgcgcgcggcgtcgagcagttcaggcagtgtgcgcagcggcgacgaagccggcaccacgatcacgttgggtacggcaccaatgcccgccaccgcgcggaagtccttgccgctcttgccctggatcgacgggttcagcatcggcccgaccacatagctggggctgaccgccagcagcgtatagccgtcggcgggtgaccgggcgacgaagtccgcgccgatggcgccgccggcgccggtcttgttctcgacgatgacgggctgcttcagtaccttggccatgttctccgcggtgatgcgggtgacggagtcgaccacaccgcccgccgagaacggcacgatgatccgtatcgggtggtccgggaagcgcgccgcattgtcaggggcggccagcactggcagcggcatcagcgcggcgcaggccagcatgccggcagcgagccggcgcaacggttggatggcatccatcttgtctccttgggttgcctgcgccgggggatttcccgcggcgcggtttcatgcgggcctctggcgggccgcttgtcatgccggcgacatcgccggcagagtgcattgctgcgtcctgccggctagcgcgcgcagctcagttcgatctgccgcaccgcctcgcgcagccttggcgccacctcgcgctccagcatgttgtcgcggttgcgcgatgcggcgatggtgcagttcagcgcaaacgggtcttcgtgcagcgactggcgcacgggtgccgcgatcgcgtggatctctggccgccactcgccgcggctcaggcagtagccgtgggcgcggaaatgcttctggtcgtccgtccacatctggcgctcaacgttgaagcgctccggatcgtccacgcgcagccggttcagcagcgccgtgcgctcgtctgcgctgcaggccagcaagatcgcgcggccgatcgcgctggccagcagcggccgggtgctgccgatgtccggctggtagaggttgccgggatccagccggcaactgtccacgtacaccaccgacagccgctcgcgcatgcccaggttcaccgtgcagccggtttcccgcgcaatggcctccatataaggccgcgccacctggcggatcgccagcccggccagcatcgggtaggccagcgccagcacgccggcgcccagccggtacttctggttgccgggcacgcggctcaggaagccgagcagccccagcgtgtaggtcagccgcgacaccgtcgccttgggcagccccgtgcgcgccacgatgtcctggttgcccagcaccgggctggacggcgtgaaggcacgcagcacctccagcccgcgcgccaggttggtggcgaactggcggtcggtggccagtgcatcctcgctggccaggccgggcaggggcaggtgttccgggttgcggtccatgctgtgcggtggttgcttgggttccatgctgggatccggagatgggggcgtcaatgttgtagcacgacagttccgcacagcgaaaccgtgcttgcatccgggcaagccgcctgccaccttgcagcagacgccaatgccgccggaggcccgccatgcaagaccaggacacacacgctgtatcgccagacgcacactgcacgggcccgctggccggactgcgcatcctggacatggccaccgtggtggccggcccgttttccgccacgctgtgtgccgacatgggcgccgatgtggtcaagctcgagctgcccgacggcagcgatccgctgcgcgggcttgaaccggttaccgaggaccacgccctgtactggaaggtgaccaaccgcggcaagcgcggcatctcgctcgacgtgcgcacgccgcgcggccgcgagatcttcctgcgcttgctgccccagttcgatgtgctggtcgagaacttccgcaccggcacgctcacgcgctgggggctggatctcgacaccctccatgcggccaacccgaagctgatcgtgctgcggctgaccggcttcggccagaccgggcccgatgcggcgcggcccggctttgcccgcatctttgaagccaggagcggcttcaccaacctggcgggcaccgcgcagagcggaccgatgcatatgaactacccggtgggggacatgatcgccgggctgttcggcgcgtttgcgattgccactgcggtggcagagcagcgcgccaggcccggccagcgcggccgcgagatcgacctggccgccaccgaggcgttgttccgcctgctggatccgctggccatcgaatatgaacagttggggcatgtgcgccagcgcgccggcaaccgcaccacctacgcggcgccgtccaacatgtaccgcaccgcggacgagatctgggtcacggtagtggcctcctccgacgccaccttccgccggctggccgaggccatgggcgcaccgcaactggcgcaggcgccggaatacgccaccaacgccgggcgcgtgcgcaatatcgaagcgctggacggcagcattgccgagtggtttgccgcacagccctatgccgccgtggcggcccggctggagcagtgccaggtgccattcagcaaggtattcagcatcgccgatatcgtcgacgacccgcagatggcggcgcgccaggccatcgtgcggctgcccgatccggacctgggctcggtgccggcgccatgcgtggtgccgcgcttctcgggctatgcgccgccgtcaccgcgtaccgggccggatgtgggcgaacacaatgccgaggtctatgggcggcttggtatcggggatgaggagctggtccggctgcgggcggagggcgtggtctgacacaccgggcgcgaaggctcactccccagtcatcagcgccgagaagtcccccacgatctgccgcaacagccgtgccgccggcggcgacaacacccggccctggcgcgacacggtctggatttccccctggtaaagcagggggtttttcattggcagcgacaccacgggcgcctcgttaagctggttccacaaggccaggcgcgtacacaggacgtagccaagccccgccgccgcgaagtgccccagcgcattgaatgacgaggtggtcagcagcgactgcaggcgcacgccctcgctgatctctgcggcctcgatgtgctggcgcacgccgaaggtccggtgcagggtggcgccagggtagggcagcaggtcctgcaggtccagcggccggcccagctgcgccagcgggtgcgaggccagcacctgggtctggatcggcatcggatgggcgtggtggcagcgcagccgcgcgtccttggggggctggaacaccagcccgatatgggcgctgccatcgacaatgcgctgcacgatctcgtcggtgctgcccaccgacaggtccaccgtgatgcccgggtgggccagcatgaaggtgcgcaggctatggcgcatcagccattcgacgaaaccttcgcccgccacgatgtcgatatggccgcgcgccaccttctggatgctgtcgagttcggccagcaactgctgcttctggttgttctggttgcggacataggcggccagcagatcgcccgcctcggtggcaaccacgccgcggccgtgccgctccagcaggcgcgtgccgcagtctttctccagcacggcgatggcccggctgacggctgaggggtccatgtcgaggacttcggcggcgccgcggaccgagccgctgtcgagcacctgcatgaagtaacgcacgcgccgcgtgtccagtttgtcgtccatcgaaagcacgtgtcactccggttgagcgttgcattgaatgcaacaagtttcccatatcacgatcattgatgaaacgctcaggcgccggaatactagcccgatccttcggtaagcggtcaagatcgaaccggaatgccgaagagagcacgtttgtgcgacataagcagccttcccgcggagacacccgatgaccaaccccattgcccagccggcgcttgcgtccgcttccccgattgccgccgtcaccggcagtggcaaggtacgactggccgttgtcacgctggtcgtggtggcgattgccgaaaccattggcgcggtgcagttcaagctggggcccggcaaggtcgtgctgatgccgatgctgtgggcgctgctgatggccgcggcgtggggcatcgcggcccggaacgtgccgcgcgcggtgcgcatcgacgcgccgctgcaatcgcttgccaccgggctgctcaatgccgggctgctgctgttcgtggtgaagctcggcctgaccgtgggcggcgcgctgccgcagctcaagggcgcaggctgggcgctgttgttccaggagttcgggcacgcgctcgggacactggcgctgggcctgccgctggccttgctgctaggcatcaagcgcgaggccgtcggcgcgaccttctcggttgggcgcgagggcaatatcgtcatcatcggcgagaaatacggcatggcgtcgccggaaggccgcggcgtgctggccgagtacatcaccggcaccgtgctgggcgcgctcttcatcgcggtgctgtcggggtttgtcagcagcctgggcatcttcgatccgcgttcgctggccatgggtgccggcgtgggctcgggcagcctgatggcggcggccgtcggcgccatcgtcgcgcagcaccccgggcaggcttccgagatcatggcgattgccgcggcgtcgaacctgctgacctcggtggccggcttctacttcacgctgttcctgtcgctgccgctgtgctcatggctgtacggcaagctggagccggtactgggccgcttctcgcgccgtgacgccatgcgcgaggtgcagggcgtcaagctcgatggcgcgctggcgcacggcacctcggcgcgggatgccgccctgggctggttcctggttggtgccggcgtgctgatcggcaacaagctgtcatacaacgtgccgctgtcggtatcgctcaagggcatcctggtagccattgccatcgtggtggcctgcgacatgctcaagcgcgtgttcccgcgcgtgccgctgctgctgacgatgtcggtggcggtcacgctgatcggcgtgccggggatgttcccgttctccgatgccgtcatcgccatgacggaaaaactcaacttcatgaccttcaccacgccggtgctggcgctggcgggcttctcggtggccaaggacctgccggtgttccggctgctcggctggcgcatcgtggtggtgtcgctgacggccacggccggcaccttcctcggcgccacgctgattgccgagttcttccactgaatcccacccgtagcagagattacccatgtaccgcgaccccgatattgccgacgacatccgccaggacatgctggcctggcgccgcgacatccacgctgttccggaaaccgcattcgaagaacaccgcaccgctggcatcgtggcgcaggcgctgggtttgatggacatcgaagtgcagcggggactggcgacgacgggcgtggtcggcacgctgcgcaacggcgacggccccagcatcgcgctgcgcgcggacctggatgcgctgaacatgcaggagctgggcaaggccgcccacgcttccacctgcgcgggcaagatgcacgcctgtggccacgacggccataccgccatgctgctgggtgcggccgcgcacctgtcgcgcaaccgcgatgccttccgcggcacggtgcatttcgtgttccagcccgccgaagagaatgaaggcggcggccgcgtgatggtggaagagggcctgttcgaccagttcccggccgatgccgtctatggcatgcacaacttcccccagttgccacgcggcaagttcgccatccgcgccggcaccatgaccgcgttcctggacaacttcgagatcgtcatcaccggcaagggcgcgcatggcgcccagccgcaccacggcatcgattccgtggtcgtgtccgcgcacctgatcaccgcgctgcagaccattgccagccgccgcaccgatcccaccgattcggtcgtggtcagcatcacgcagatccacggcggcgatacctggaacgtgctgcctgagtcggtggtgctgcgcggcaccatccgcacgctgaaccccgccgtgcgggatcgcacgcagacggcgatgcggcagatctgcgagggcgtgggcacgacccacgaggcgcggatcgcgattgactaccgccccggctaccccggcgtggtcaacacccccgccgagaccgacgccgccattgccgccgccgcgcaactggtgggcgccgacaacgtgaagaccgatatcaagccggcaatgggatcggaggacttcgccttcatgctggaaaagcgccccggcgcttatatcggcatcggcgccggcgagagcgcggaagacccgcccctgcacaatccctactatgacttcaacgacaggatcctgccgctgggcgcggcgtattgggtggcgctggtcgcgcagcaattgccggccagatgatccgcgcccgtcaggacctgcgggctgcttgcgcgaacacgttcaggaagcccagcgcgggctgcgcgccggtgtgcgcttcgatggcggcagccagcaccggcgccggcagccagggatagggcagcgccgcctgcagggccgccagcgtgaccgcgccgggatcggcgatcgtgtccatccgttcgatatggatatgcaggctggcgatacggtacgtgccgtcatcgccggcggcaaagccccagcggtaatggcccttgccgacgcgcaaggcgctggccgcggtttcccgcatcaccaccagccaggggatcgtcatggcgttgccgtccagcgcggccgcaacgtcgccgatgtagtaggtccggcagcggtcgaacgtcttcgcaaactcgctgaccagcgtcgaggcaatggcatccgcgccttcggccttgggcggaaagctgatggagtcggtatcgatcgagaaggtcagcgacgcatccggagcaaaggcttcgtggatcagcgccgggcggttgttgtccttggcctcgacgtattgggccagccgggctttggcggtggcgagcgggattgtgttcatgctggactcgggggtatgggttgaaaggcggggcggccagggtgttgcggcgagtttgttagaatttggcacaaagcttgtatcaaaagctaagtggacataccgccgatggcaacgactcctgcaaataagaacctgaccgtaacgcatccggcgtgcctggtcgacggctcggaccgtgaattccggcacctggtgaatggcctgctgccgtttgccgcgcgcctgctgtccgtgcgcgacggctttggcagcctgatcggcctgacgggggtccagtactcgctgatccgctcgatcctgcacctgtcgcagcaaggcgaggtgacggtcaaccagctcgccgaccatctgcacctgagcggcccgttcatcaccatcgagaccggcaagctcaagaagctggggctgatcgacaagaaggcccatcccgaagacaagcgcaagatgcgtctgaccatcaccgccgccgggacgcgtctgctcaatgaactgctgccggtgcagcagcagatcaacgacgtattgttcgacggcgtttcccgcaccgaattcaaggtgctgtgttcggtggtcgaccggctggtcgccaacggcgatcgcgccgcgctggatctcgaacacctgcaggcgcgccggcagaaaggctagtgcgcggcccactgcaccgtgccgacatcgatgccctcctggtgcatctcccatagcgggctcagttcacgcaggcgggtaacggtctcgctgacctgccggatgacctcgtccacctctgcctcggtggtgtagcgcccaagcgtaaagcggatcgagctatgtgccagctcgtcgctgcggcccagcgcccgcagcacgaacgagggctccagtgaagccgaggtgcaggccgagcccgacgacaccgccacgtccttgatgcccatgatcagcgattcgccttcgacatagttgaagctgatgttcaggttgtgcgggatacggtgcgccaggctgccgttgacgtagacctcgtccagccgcgacagccccgccagcaaccggtcgcgcaacgcgcccacgcggcgcgcttcctccgcaagttccagctttgccagcctgaaggcttcgcccatgcccacgatctggtgcgttggcagggtgcctgagcgcatgccgcgctcatgcccgccgccgtggatctgcgcctcgatgcggatgcgcggcttgcgccgcacgtagagcgcgccgatgcctttcgggccatagaccttgtgcgccgtcacggtgagcaggtcgatcttcagggtatccaggtcgatggcgatcttgccggcggcctgcaccgcatcgcaatggaacaccacccccgtcgcgcggcatagctcgccgatctgcgcaactggctggatcacgccgatctcattgttgaccatcatcaccgaaaccaggatggtgtccggccgcatggccgcgcgcagcgcgtcaaggtcgaccaggccgtcggtgccgacgtcgagataggtcacctcaaagccctgccgctccagttcgcggcaggtatcgagcaccgccttgtgctcggtcttgaccgtgatgatgtggttgcccttgccgcgatagaaatgcgccgcgcccttgatcgccaggttgttgccctcggtcgcgccggaggtccagatgatctcgcgcgggtccgcattcagcagcgccgccacatgcgcgcgtgcggtctcgaccgcctcttccgcctgccagccgtagtagtggctgcgcgatgcggggttgccgaactgctggtgcaggtagggaaccatcttctcgacgacccgggtgtcgaccggtgtcgtcgcgctgtagtccatgtagatcggaagggtgttcggctcggattgcatggcgctcattcctggaggcggatgtggggacgaccgtgggcaaagcgtacccgctggtcaaggaaagtggggccgagtctagcaccgggtagcggccgttcgcggcagcgccatgctgccggtagggttgcttgacgcgcggacagctgcagttcaggccgcgtggcgccacctgtccgctagccggaaaaacttgtccagcaacggtttccggatttcattgagtcgcctcgggagctgtccggctccgcactctagggtttccaccaacttgaatgccgttgttttatagcattcaataaaacctaagttacaaaggtaaataaacaaaataacaggtttggtgacaacacttgcgtaggagtcgtgatggctgagtcatctgtcggtcagggcgtcaatgtggacgccgaggcgcagcgccgcttcagaaatgcgttggcgatgtttgcaacaggcgtcgccgtgattaccgcgccgcgcgaagaagggctgccggtcggcatcacggtggcgtcgttcaactcggtatcgctggatccgccgctggtgctgttctcggtggaccgccgctgcctgagccttggcgacctgcgcagcgcgcggcgctatgccgtcaacgtgctgggcgaggcgcagcaggatatctcgaaccgcttcgccagggccaattccggcaagtgggaaggcatcggtttcagcaagcgcaacgaggacagccacgtgctgctgccggacgcgctggccaccttcgagtgcgagccctatgccatgcacgacggcggcgaccacgtgatctttatcgggcgggtggtccgtcaccaggcccgccaggacggccggccactcatcttctttggcggcaagtaccgggcactggaagacagcccggccgccgcctgaatccacaagaacagacagtcagcacaggagaacgacatgatcaagaccggtaaccagcacatcgccatgctgcgcgatggccgcgaggtgtacctggacggcaagcgggtgacagatgtcaccagccacccggccttccgcaattcgatccgcagctacgccaacctctacgacttccaggcgcagccgggcaatatcgacaagatgaccttccagccggcgggcaccgaccggcgcgtcagccggatctgggagctgccggccagctacaacgaactggtcgaacgccgccagatgctggaagcctggaccgaactgcactacggcttcatgggccgctcgcccgaccacgtggcttcctgcatctcgggcatgtacatgggcatcgatgtcttcgagcaggccgatccggcacgtgccggcgcgctgcgcgactactaccgctatgcccgcgacaacgacctgttcctcacctatgtgatcgtcaacccgcaggccaaccagtccaagtccgcgcacgagcaggaagacaagtacctggcggtgggcatcgtcgaccaggacgcggagggcatcaccgtgcgcggcgccaagatgctggcgaccagcggcatcatggccaacgaggtcttctgcagctgcatccagccgctgcgcgagggcgacgagatgtatgcgctgtccttcgcggtgccgatgaacaccaagggcctgaaggtgatgtcgcgcaagtcgtatgaagccaatgccacctcggtgttcgacaacccgctggccagccgctttgacgagaacgacgcggtgctctatttcgacgacgtcaaggtgccgtgggagcgcatcttcgtcgcgggcgacgtgggcttgtgcgccaggcaattccacgccacgccggcgcacgtctaccagaactaccagtgccaggtgcggctgatggtgaagctgcgtttcctggtgggcctggcgcaccgcatcaccgagatcaacggcaccaacagcttcccgcaggtcagggaaatgctgggccagctcgccgccgaagcaggcatggtcgaggcctgggtctacggcatggaggccaagggccaggtcggcaagcatggctacttcgtgccggaccgcagcatgctgtacggctcgcaggtggtgacccagcagctctacggcaaggtgctggccacgctgcgcgagctggccggcggcggcatgatcatgctgccgtcgagcatcgaggatttcgccaatccgtcgctcgccgggatcatcgccaagacgcagaagtcgccggtgtgcagcccggaagagcgcgtcaagttcttcaagctcgcctgggacgcggtcggctccgagtttgcgtcgcgccacaaccagtacgagatgttctatgccggcgccacctttgtcaccaaggggcatgcctatcgcacctacgactggcagaacgcatccggcctggtcgacaacatgctcggcagctattcccttgaaagcgaactggccaagctgccgcaggccgcctgactttccgcacctttcccaattcccgcatcgaacacggagatcgacatggcaatcaccaaacttcacgacgagttccacaccctggacctggagtccggctgggaggtcccccacggctatccgtcgggtatccagcagaagatcctgtccggctcgctggacgagaacggccgcagcggcagccgtacgcgcctgctgcgtttccagcccggcgtgttcaccacctcgcccttcgtgcatgagtactgggaagaggtctacctgctcagcggcgacctgaccgtcggcaacgacgccaatggcaagggcggcgaggccttcgtccccaacacctacgcctgccgcccgcccggcgccttccatggcccgttcaagtcagacggcggctgcatgctgctggagatccactactacgacccggcctgatcatggaagcgactatcgcaaccgcgcagcgccagcttgccgcgggcagcgccaacgcgctgtccctgctggcgtcatgcgtcgaacgtatctgcaatccaggcggcgagggcgcgcgcgtattcccgcatggcgtgagcatggcggcgcgcaagcaggcccaggccagcgacatgctgcgcgagcagggcgtggccggcccgctggcgggcgtgccggtgtccgtgaaggacctgttcgacgtgcagggcgacgtgactcgcgccggcgcacgtgtgctgccggagcgtgcggccagtgccgacgcgccggtcattgcgcgcttgcgtgcggcgggggcggtgtttgtcgggcgtaccaatatgaccgagttcgcctactcgggcgtcggcatcaatccgcactacggcacgccacgcaatccctacgaccggcaggcgggccgcattcccggtggctcgtcgtcgggggctgcggtgtcggtgaccgacggcatggccctggccgcgatcggctccgacaccggcggttcgtgccggatcccggccgcgttgtgcggcatcgccggcttcaagcccacggcgcggcgcgtgccgctgcagggcacggtgccgttgtcgcccagctatgactcggtgggctgcctggccaacactgtggcgtgctgcgccgcagttgatgccgtgatggcgggcgaggtgccgcccgcggggccggcgccgctggcagggctgcgcctggcggtgcccaccggcctggtgctggaaggcatgtcggacgaggtggccgaggtcttcagccgcacgctgcgccggctgtccgcggcgggcgcgctgctgcaggacgtgagcttcgacagctgggaccagctggccggcatcggcgcgaacggcggcctggtcgcagcggaagccagtgcctggcacggcagcctgctggctgagcaggccgatcgatatgacccgcgcgtgctgtcgcgcatccggctggctgacgggcagcgtgccgccgactacctgcgcatgctgcagcgccggggcgagctgtgccggcaggccgatgccgagctggcgggattcgatgccgtggtcctgcccaccgtgccggtcgtggcgccgcgcatcgcggacctggacgacgacgaagccttcttcagcaccaaccggctgctgctgcgcaacccggccatcgccaacatgctcgacctgtgcgcgctgtcggtcccgtgccatcgcccgggcgacgcaccggtggggctgatgctgttcgggcgccacctgtccgaccgcaggctgctggccatcggcatgggcatcgagggggcattacggcacgagcggggttgagcccccgcagcagtacagaagtacccataactacagtggagacaacaatgcctgatatccgtaccggcgccgccgtactggcctgcgccaccctgttcgcggcgactgcttccgcagccgacccggcccccatcagcgacggcgtggtcaagatcggtgtgctgaccgacatgtcgtcgatcttttccgatatcggaggcaagggctcggtggtggccgcgcagatggccgtggacgatttcggcggcaaggtgctgggcgcccccatccaggtggtcagcgccgaccaccagaacaagaccgacgtcgccgccacgctggcgcgcggctggttcgacaaccagaaggtcgacgtgatccaggacgccctgccgtcctcggtcgcgctggcggtatccaacctgggcaagctcaagcacaagatcgtcatcgccagcggtgccggcaccacgcgcctgagcaatgaagactgctcgccctacaccatccagtattcgtacgacacctacgcctttgccgccaacacggtcaaggcgctggcccggcgcggcgaccacagctggtacttcctgacggtcgactacgccctgggcgcgtcgctggagaaggacggcaccgaggcgctgtccagtgtcggcggtaccctgaagggcaaggccaggcatccgatcaactccgccgacctgtcgtcctacctgctgcagggacagtcctcgggtgcgaaggtgatcggcctggccaacgctggcgccgacacggtcaatgcgatcaagaccgccgcggatttcggcatcaacaccgcgggcaagcagaagctggccgggcttcacatgtttatcagcgatatccacagcctggggctgcaagccgcgcagggcatgacgctgaccacatcgttctactgggatcgcgacgacgccacgcgcgcctggtcgcaacgcttcttcgacaagaccgggcgcatgccgaccctggtgcatgccggcgtgtattcgtcgaccacgcattacctgaaggcgatccaggccgcgcgaaccgacgacagcgatgccgtgctggcccgcatgcgcgagaccccggtcaatgacttctttgcgaagaacggcacgatccgcgccgacggcctgatggtgcacgacatgtacctggtcgaagtgaagcggccgcaggagtccaagcgtccttgggactactacaagatcaagagcgtgattcccgcgagcgaagcgttccgcccgctcagcgcaagcacttgcccgctggtcaggaagtaagcccacatccctcatcgaggccggcattccagccggcactccaccccgttgcagagagcaaccgatcatgcagacccttacctttgaactcgacagctgccagggcaagtcgcagcgcaccgtcaccatccatcagctcatcgtggcgggatggaccgggcgcgacgtcgaagccatggaagcccatatccgcgaactggaggagttgggcgtgaagcgcccgccctatacgccggtgttctatcgcgtcgctgcgcaacgcctggggccggccccggagatccaggtcagtggcgaggccagcagcggggaagccgagttcctgctggtccgggacggcgatgaaatcctggtgggcattgcctcggaccataccgaccgcgaagccgagacctacggcatcaccgtgtccaagcagatgtgcgagaagccctgtgcgtcggccttgtggcgcctttctgaggtggaaggccactgggaccagctgatgctgcgctcctacgccaccatcgacggcgagcgcgtgctgtaccaggaaggtccggtgaccgccatgcgctccccggcggacctgctgcagcacttcagcggccatggcggcgactttggcgaaggctcggcgatgctgtgcggcacgctgcccgcgatcggcggcatccgcccggccgagcgcttcgagatcgagctggaagacccggtgctggggcgcacgctgcgccacgcctacgcggtcgctgcgctgcccgtggcgggctgagcatgccgcgtcatccccacagacacggcagcgccacggagtcaccgccatgcaccaagacctgatactagagacccgcaacctcggcaaggccttccgcggctttaccgcggtgagcgacgtcaacctgcgggtacgccgcgggtcgatccatgccttgatcgggcccaacggcgccggcaagacgacctgcttcaacctgctcaccaagttcctggagccgaccaccggcaccatccttttcaacggcatcgacatcacccgtgaaaagcccgcgcagatcgcgcggcgcggcgtgatccgttcgttccagatatcggcggtattcccgcacctgacggtgatggagaacgtgcgcatcgggctgcagcgccagctcggcacggcgtaccagttctggcgcagcgagcgctcgctggacgtgctcaatgaccgcgccatggagctgctagagcaggtcggcctgaccgagttcgcgcagacgctgacggtgaacctgccgtacggccgcaagcgcgcgctggagatcgccaccacgctggcgatggagcccgagctgatgctgctcgacgagcccacgcagggcatgggccacgaagacgtggaccgcgtcacgcagctgatcaggaaggtctcggcgggccgcaccatcctgatggtggaacacaacatgagcgtggtctcgtcgatcgctgacaagatcaccgtgctgcagcgtggcgcgatcctggccgaaggcccgtatgccgaagtgtccagggatccgcgcgtgatggaggcctacatgggcaccgtcgacgcggaactgcagggcgcgcactgagagggccggggaacgatatgacttcattgaacacacccgccaacacacccgcgctcgagatcaaggacctgcacgcctggtacggcgaatcgcacatccttcacggcgtggatttgaccgtgaaccgcggcgaagtggtcacgctgctgggccgcaacggcgctggccgcaccaccacgctgcgcgcgatcatgggactgaccggcgcgcgcaagggctcgatcaaggtcaatggccacgagaccatcagcctgcccacgcacaagatcgcgcactacggcattggctattgccccgaagagcgggcgatcttctccagcctctcatgcgaagagaacctgatgctgccgccggtgctgaagggcgccgacaccagcaagggcatgagcgaaaccgatatctacgagatgttcccgaacctgaaggagcgccgccagagccagggcacgcgtctttccggcggcgagcagcagatgctggcggtcgggcgcatcctgcgcaccggcgccaacctgctgctgctcgatgaaatctcggaagggttggcaccggtgatcgtgcaggcgcttgcgcgcatgatcctgatgctcaagcagaaggggtacacggtggtgatggtggagcagaacttccgctttgccgcgccgctggcggaccgcttctacgtgatggagcacggcagcatcgtcgagcgcttcgcggccaatgagctggaggccaggatgccggtgctgcatgaactgctgggcgtataaggagcgactcatgaatctgtttgaaatcccgctcccggcgctgctgtcgcagttgttgctcgggctcgtcaacggcgccttctacgccatgctgagcctggggctggcggtcatcttcgggctgctgaatgtcatcaactttgcgcacggcgcgctcttcatgctgggtgcggtgctggcgtgggccggcatggcctatgccggcctcagctactgggtgatgctgctgttgtcgccgctggtggttgccgcgctgggcgtggggatcgagaagaccatgctgcgctggatctacaagctcgaccatatctacggcctgctgctgacgctaggcatcacgctggtgatcgaaggcatcttccgctcggtctatggcgtgtccgggctgccctatgcaccgcccgaggcgctgcagggcgcctccgacctcggcttcatgcgcttgcccaactaccgcgtgtgggtggtcggggcatcgctggcggtctgcctgtcgacgtggtacgtgatcgagaagaccaggctgggcgcctacctgcgcgccggcaccgagaacgccaaggtggtcgaggcgttcggcgtcaacgtgccgcggatggtgacgctgacctatggcttcggcgtggcgctggccgcgtttgccggggtgctggcggcgcccgtcatgcaggtatcgccgctgatggggcagaacctgatcatcgtcgtgttcgcggtggtggtgatcggcggcatgggctcgatcatgggcgcgatcctgaccggcctggggctgggcgtgatcgaggggctggccaaggtgttgtacccggaagcatcttccaccgttgtcttcgtcatcatggtggtggtgctgttgttgcgcccggcagggctgttcggaaaggagaagtgatgagcggacaatctatcgccgcaatcggcatgcggcagcagcaggcggcggggcgcctgccaaagcaggtgatgtacggcgtggtgctggcgtgcctgctggccgcgccgctggccggtgcgtatccggtgttcgtgctcaaggtgatgtgctttgcgctgtttgcgtgcgccttcaacctgctgatcggttataccgggctgctgtcgttcggccatgcggccttcttcggcggcgctggctacgcggccggccatgccatgaaggtctggggcgtgaccccggaaatcggcctgatcctgggcaccggtgcgggcgcgctgatcggctacgtggtgggctcgctggccatccgccggcagggcatctacttctcgatgatcacgctggcgctggcgcagatgctgttctttatctgcctgcaggcgccgttcaccggtggcgaggacggcctgcagggcatcccgcgcggcaagctgttcggtgtgctgccgctgtcggacgacctgacgctgtactacgtcgcgctggcgatcatcgtggccgcctttgcgctgatcgtgcgcacggtgcattcgccgttcggccagatcctgaaggcgatcaaggagaacgagccgcgcgcggtgtcgctgggctatgacgtcgaccgcttcaagctcacggccttcgtgctgtcggcggcgctgtcggggctggccggctcgatcaaggcgctggtgctgggcttcgagacgctgaccgacgtgcactggtcgatgtccggcatggtgatcctgatgaccctgctgggggggctcggcacactcaccggcccgatcgtcggcgcgtttgttgtgatcgcgctggagaacaagctgggcgaactgggcagctaccttgcggcggtgacggacatcgactggttcaacgggctcggtgaatcggtgtcgatggtgacgggcatcatcttcatcgtatgtgtgctgaccttccgcaaggggattgtggggagtttggggcgcggacccggatgaggtgaaagccgtccaaggagtttctcctctctcgcgcttgcgggagaggggccggggagagggtatccctcacgcaatgcggcctacaagatggggctgggagcccacacgcggctcgcgcaggcgatcggggagctggtagtgcgggcgcaggccgagcgtgcggctgccgcaccgagcgccccacagccaggaggccggtcgcggtcgtcccgcgaacaataggcttcaaaccgcccggccgtcatgcaaagcctttgaaaaatcatccccaaatttaggccatgtctgattgatccccactgccgatttcggctcaatggtattcggcaaaccagccgtttctaaccgaggatcaatgatgcaagacaggaaaaccaagaagatttacgttgcagcattcgaaggtgcgaagaccgccaacggcggtgaagtcgtgaagggttccggcaatcaaagctacgatggccgtcccatcgtccgggttggcgacgtggcgacctgccaggatggcagtacggcggtgattatggcgggcgcaggcaaggcgtgcgagtcagcaggcgtgccggtggccctcatcggcagccccctgagcaatggggacaccattgtgttcagtcccgtgacggcgctggaattccacgaatcggcagacaagtctatccttggcctgctcgatcccgcctactattccgtgcgtgcctaagaggccgtcatgccggatattcgctacgcactccggaacggagacaagacaagctcgagcggcatactcttcgccacgggccgcagcatattccatcatgacctgatagtcggtgtcgaaggcgaccatgcaacctgccccgcctgcaaggtgggcgggccggtgatgaatgactgttatccggccgtcgatgtagatggcaaacagatgttggtgactggtgcgcgagtcaattgcaagtgcccgactcacccggttgtcatccactcgcggatggatttcattattgaggtgaaccggggaggccgcaatgcgccgccgccgccatcgtccgcgtccttggcctcttcgaacctgacttcgcccgcgacaggtgactacgacgagcaagtccgagtccgagcgggtaatacacccttggaaggctacccctacttcatcgcgacgcccgacgggcgggcattctccgggtgtatagacgaaagccgcaagttaccccgcatatatacaaagaacctcaacgagtacgcaatttattggggcgatgacgctctagcaaaacagatagaggtatgaggtatgcccaataagaaaacgatcgtgacaacaaacgcgacaccgaactccattaaggaagtgcagcttaaggtggtaacgtttcaggaactctgggaaaattatccgtcgggtaatccatacgacaatccggcctattccgatcagtgcgcgatccgtatgagtgttactcttcatcgagtcggcatcgagatgaagtccttttcatcgaagcttgtgaagccgctgtcggggcagccgagtatcgggcgtattattcttcccgcagacgggaaggtcactgccacgcgagcaaacgaactcggggaatggttgaagttgcaaccttttgccggcctagggaaggcggagaatattacagggcgggactgggtgggcaaggtaaaggggcgaaccggaataataatgttcgatggctattggacgcgtgacggagaggtggcagggaatgctagcggaggccatatcgatttatggaatggagaaaagctcacaggctttggtactggtctaagagtaagtttgaatattgtggttccgggtatttggtcagattttcgcaactcgaaaacaattcttttcttccccgtaaaatgaagatactgagagcagtcatcggcgctatgactggtgctgtcctggctacgcttgctgcttggggcgggttatatctcttcggcgttgtagttttgcgcgggacaggaagtttgttcgacacgaatcagcatgcagcgaatctgttctttgttggctggttcgtgtctatggtcgcagcctcattaattggtggatggcttgggtattcatccgggcgaaaatagggcacaaatccactatttttcaagcgtatacatgcgccgcgccatgattccatcatggcgcggcgctgttcgagcacggtggccctatcttacaaatgggagaggggagaaaacacccgcgaactcaagccttggccaatgccatcggcgcacccgccgcgactgccaccttcgcgccgacatgctggtcgacaacccctgccaccatatccgccgtcaccgccgacaaagtccaccccaggtgcccatgcccggtgttgtagaagatgcaggccgcacgcccgcgccccacgcgcggcagcatatccggcatcatcggccgcagcccggcccaaggcaccacgctgcgcgtgctgacgccggggaagcactgctgcacccattccaccagcgggcggatgcggtcggcgcggatatcgcggttgtagccgttgaactcggcggtgccggccacgcggaagcggtcgtcgcccaggcggctggtgaccagcttggtttcgtcgtcgagcaggctgaccaccggtgcggcggcgcggctggcctcatcggtcaggttgaccgtgatcgaatagcccttgaccggatagatgttgacgcggtcgcccagcccggcggccagtgcgcggctggcggtgccggcgcagatcacggcgccgtcgaaggtggaggtggccgtgtcggcgccgtcctgcacggtcacggtggcgcgcctgccgtcggtcttcaccgcccgcacgtcctggccgtacaggcagcgcacgcccagccgatcgatggctgcggccaggccgctggtgaacttgtggatgtcgccggtggaatcgctctcggtgaagtagccgccgtagtacgagccggccagcgtcggctcgatcgcgcgcatctcctcgggcgtcacggcgcgccgttccagcccgccctgcgccagcagtgccgagacccggccggcatgctcgaagccggtcttgtcgcggtagatatggaggatgccttccttcttcaggtcgaaatcgatgccttcctgcgccgcccaggcgaacaggtgctcacgcgccgcgatggccaggcgcgcggtctcgatggtgttgcggcggtagtgggggatcgcggcgatgaactcggcgaaccaggacagcttgtgccagctgggccggggattgaccaacaacggggcgtcgttgcgcagcatccatttcatgcccttgacgagggtcgaccagtgggtccagacctcggcgttggaggccgacaactggccgccgttggcgaacgaggtctccatggcggcatagcggtgccgttcgaacagcgtgacggagaatccgcgccgggccagcgcgtaggccgtggtgacacccgtgatgccaccgccgatgacagcgattgatttcatgatctgcaggttccaggaacgtcgatggtgggagcccggacgcaatatgcgtggcggacgccccctctgttctggacctgagagattcacgccacccggccgcgagggcggggcgcgcttgctccttcggtatgccggcggacgatagcgtccggcattcttcagagtgcactgactggtgatgccggtccttttgcctgagagtttccggggcggttgctccttcggcgctgtccgcggcgggcaccgcgacagtctctccctgcatcacattggcttgacgccaatccgggcaatgtagtgacaaggctcgacgttggatatgcgggttaacgcttaggcagcctgccgcccgcgtcgctatgtcgcatcggcctgcgcccccgtgccccataaaatgtcagcgctcgctctcggggagaggcgccgtatgctgcgctcaggtggagtgagtcgaaaaagacgacaacaaggttttccagtgaagaagaatcgcattgcactggccgtttcggcggtgctgatgggccccgccgtcgccgccgcccaggtggtggacgcgcccgagccgctgcaggaggtggtggtctcggccaagtcggagcgcgccgagacgccggccataccgcccaacacgccctcgccggcctacggcatcagccgccgccgcatggccgacttcaatgtggtgaacacggaagacgccctcaagtacgcgcccaacctcgccgtacgcaagcgcttcatcggcgatatgaattcgatcatctcggtgcgcagcaccagttcgcgccagtcggcgcgggggctggtctatgcggacggcctgctgctgtccaacctgctgggatcggacttcagcttcccgccgcgctggtcgctggtcaacagcgccgagatcgagcgcatggatgtgctgtacggcccgtattcggcgctgtatcccggcaactcgctgggcgcgacggtgctgatcaccacgcgcacgccggagaagttcgagggcgatgccagcgtgcagctgttcacgcagcgcttcagcctgtatggcacgcacgacaacttcaacggggtccacgccaacgcctatgtgggcgaccgcgtcggcccgttctcgtggctggtcagcgtggaccggcaggacagcaagagccagccgctgagtttctataccgcggcgcgttccacggcccgtgccacttccgccgacaagccggtcaccggcgcgcacttcgaccaggaccagaccggccgcgagcgcgtggtgatgggcgtgaacagcgagggcgtcacgcataccgtgcaggaccagctcaagctcaagctcggctacgacatcaccaataccctgcaggcgcagttcaccgcggcctactggcagcaggaccgctccagtgccaccggcagctacctgcgcgatgccgatggcaatgttgtgtcgagcggtcccgtgaatatcggcggttatcgctatgtgattcccgccaacgccttcgccccgagcaatggcgaggacgcgcgctggctctatggcctgtcgctgcgtacgcgcaatgagaccggctggaatttctcgggcgtggcgtcgctgttcgatgtcagcaaggacatcagccgcagcgccaacaccgtcggcagcgggccgggcacggtgacctatggcgacggcaccggctggcgcacgctcgacctgaaggccgactaccggccgcggcagctgcagggcgggcactgggtcacgttcggctaccactatgacaattaccggctgagcaacaccacctacaacacctcggactggcaggcggccaccatcagcgccttcaacaacgcctttgccggcaagaccgagacccaggcgctgtatgcgcaagacgcctggtactttgccgaggactggaagctgatccccggcgtgcgctacgaacactggcgcgcctatgacggcagccgcagccagcccggcgtggatatcggctacccggtgcgcagcgaatccaactggtcgcccaagctggcgctggagaaggcattcgggcaggactggctgggccggttgtcgctgggccaggcctatcgctatccgactgtcagcgagctgttccagggccgcatcaccgggaccgcgttgatcaacaacgatcccaacctgcagcccgagcggtcgttctcgaaggacctgaccttcgagcgcacgctggattcgtcgtacttccgggtctcggtgtatgaggacgatatccgcgatgccctggtcagccagaccaacaccacggtattcccgactgtcaccagctttcagaacgtcgaccgcgtgcgcacccgcggcatcgagctggcctatgacgcgcgcgatgtgttcgtcagcggcttcgacctgtcggccagcggggcctacaaccattcgaagacgcttgagaacgccaacaacccggcctcggtgggcaagtacttctaccgcatccccaagtggcgggccaacctgatgggcacctatcgcatcacgccggcctgggccggcacgctggccatgacctattcggggcggcagtacaatacgctcgacaattccgacgtcaaccccgacaccttcggcggcaccagcagcttcctgacctttgacgtcaagctgacgtaccggcccgcgaagaacgtgcgcctcgggcttggcatcgacaacctcaccgaccagcgctactacgtctatcacccgtatccgggccggacgttctacgccgaggcgaaactctccttctgagcacgtgaacaggctgaccacaaccatgcaaggcgttcgccccggtttccgcttgatcgttgccgggctgatgatggccggtgccgcgctggccgcgaccgcgcaaacgcacggcgatcacagcggccacggcgcgcaggccaaggccgcgaagatgagcgagctgggcaccggcgccgcgttcgatcgaaacggcaagctatgggtcgcctacaaggacggcccttacgtcgcggtacgtgcatcgaccgattacggccgcagcttcgggccggcgcagcatgtcaacagcgtgccggagcaggccgccgccgatcacgaaagccggcccaaggtcgccaccgggcgcgacggcgagatcttcgtcacctggacccagccgctgcccaagccgtggaccggctttatccgctttgcgcgttccaccgatggcggcaagtccttcgccgaaccgctgacggtgcatgccaaccgcgaccagatcgcccaccgcttcgacgccatcgcggtggacaatgccgggcgcgtcttcgtcagctggatcgacaagcgcgacgtggttgccgccgaggcgcgcaagcagccgtacgccggcgccgcggtctactacgcggtctcggccgatcacggcaagaccttccagggcgactacaaggtcgccgaccagtcgtgcgaatgctgccgcatcgcgctgtcgcccacgcccgacggcaagatgctggcgctgtggcgccatgtattcccgcccaacgcgcgcgaccacgcgctggcgctgctgggcaccgacggcaaggccacgccggtgcagcgcgccaccttcgacgactggcgcatcgatgcctgtccgcaccacggccccggcgcttcggtggcgcccgatggcacggtgcacatgatctggttcaacgtgcgcgaaggcaagcccacggtctcggtggggcgctggaaggacggcaagctgcaggcacagcgcccgctggatgatccgcgtgcgcagcatgccgacatcgtcgcgctgaacgacaacgagatcgcggtggcctggaaatcgttcgacggccggcagacacggctgtccgccatgctgtcgcacgatggcggcaagacctggcagacgcgcaagctggccggcacggagcgcgactcggaccagccgcacctgctgcagcacgccggccgcgcctacgtgctgtggcgtaccgatgccgagggcttccaggtgttcccgctgggcaaggagggcgcatgatgccatcccgccgcaagctgctcgccgctgcagtcctgaccctggcgatgactgccgccaatgccggcagtcaaccggccgagcgcgttgccgtgttcgcatcggccagcgccgcccagctcgcagccagccagcagggcaagccctttgtgctggtggtgtggtcgctcgactgcgtctattgcaagcgcaacttcgacaccatcggcaagctgcgcgcgcagcatccaaacctgcgcgtcgtcacgctggcgacggacaaccccgacgcgctgccacaggtgcagcaactgctccagcgcgtcaggctcacgcgcaacgcgtgggtgttcgggcacgagccgcaggagcggctgcgctatgcggtcgatccggactggatgggcgagatgccgcgcacctacttctatcgcgccgatggccagcggcagggcgtgtccggcgtgatcagcgacgccgactgggacaagcacctgcgctgggctggcatcgccggctaaggctgtgccgggagcggctgtccgctcaatccggcttgatcccggcgcgcgcaatgatgggcttccagcgctgctgttcctgcgcgataaagcgcgagaactcggccggcgtgccgcccacgacaatcgccgcatccgcgctcaggcgctcgaccgaggtcgggcttttcacggcttttgcggtgacgtccgccagcttgtcggcggccgcctgcggcagcgatgccggcgccagcagtccgtaccactgcgtcatttcgaagccgggatagccctgttccgcgaccgtaggcacgtcaggcagctgggcaatgcgctgggtcgtgccggtggcgatgcagcgcaccttgccggccttgatgaactggatgatcgccggcgcgccgaccgcggccgcatccagccgtccggacaacaggtcagtgatctgcgggccgctgccgcgatacggcacatgggtgatgaaggtgccgctcgcggctttcaggtattcaaaggccaggtggccggcgctgccgttgccggccgaaccgtagttcagcttgccaggcttgctcttggccagcgccacgaactccttcaggttcttcgcgggcacgtcggggtggaccacgtacaggctcggcaccttggacagcagcgagatcgcgcggaagtccttgacggggtcgtagggcagcttcgggaagataaacggattgaccgccagcgtgccgatatggccgaggatcagcgtgtggttgtcatcggcgcgcgcgacttcggccatggcgatattgccggccgcgccgggcttgttctcgacgaagactgacacgcctagcagcttggtcagctccgccgcggtggagcgcgccacgatctccgagctgccgcccggcgcgaacggcaccaccagccggatcggcttggccggccaggcctgtgcgcgggccagtgttggtgccagcgcgcacgcgcccagcgcggcggtggtcttgagcagatggcggcgaaggggatttatcggggtcatgtatttctcctcaaagttctgtagctgggccgtggtggggcagagtcggtgccaattggtgctattcgggcttgatgttgccgtcccggatgaccttggcccatagccgggcctgcccgtcgatgaattgccgtgcctgtgctggcggcgcagccacgacctcgccgcccagctcggccacgcgttgccggatctcggggctggtcatgactttccgcagggcgtcggcgagcttcgctgcgatcgggtccggcgttgcggcgggcaggaaggccgcgttccattcatagacctcgtagctcgccacgccggcttcctgcatggtgggcacggacggcaatgcctgggtgcgggcatggctggtcaccgccagcggcttcagcttgccggccttgatgtgctgcaggctcgaagcgacgttggcaaagaacagcggcacctggccggcgatgacatcggtcatggcggggccgccgcccttgtagggcacatgcagtagatcgacccccgcgcgctgctcgaacagcacgccggccagatgctgcgccgagccattgcccgaggacgcaaaggcgaccgagcctggcttttgcctggccatggccaggacgtcgctgaccttgctggcggggaagcccgccgtggccaccagcacgttgggatagcgcgccagcacgccgaccggccggaaggccttgtccggatcgtagggcaggcgcggatagaggctgggattcaccgcataagaggaggcatcgaccatcatcgtgtagccgtccggtgccgccttggcgacataggcggcaccgatctgcccgccggcacccgggcggttctcgacgacgacggtctggcccagctcgcgcccgaggcccggcgcgatcagccgtgccatcaggtccgcgccgccgcccggcggatatgtcaccacgatcgtgatgggccgtgccggccaggccgcggcggtgtcggcggcctgcgccagcgtggtggtggcgatcatggcagcgaccgtggcggcgatcgcgtggcgtgcgtgcatgggtctgtctcctcgggtgcggtccgtcagcggacgtccgcggtatagcgaaaggcaaaggcgtcgccccgcgtcagccggtattcgatgcagttgccgcccaggtcgaaggcatgccgggtcacgaccgcgcacggatgcgcatccggcaggtccagcaaggccgcctcgtctgctgccagcgtgcggaaggtcacttcgtcaacggcgcgatggaccgtgatgccgcaggcgctgcccagcagcgggtagagcaggtcgccccattgcgccggcgggagttgctgcagggcttcgcagcgcggcagcggcagccagatcgattccagcagccggggcgtgtcctccagccagcggcggcgcgagatcgccagcccgcgcgcgccggtcggcagcccgaagcgggttgccatggccttgtccaggcgcacggcgcggcacgacaggatttccgagcgcggcaccgccggcgcgccatcgacgccgccgaagcggaaaaaccgcatcaggctggccccgctcagtcccttgcgcacaaaggtgcccttgccctgcacgcgctccagcaggccctgctggaccagcacggcgatggcctgccggatggtgcccagcgcaatgccgaactccctggccagcgcgccttccgcagggatggcgctgccgggcgtccacgcgcccgaaacaatatttgcctgcagttccgccgcgatctggccgtagcggctcaggccagcggcggtggttgtagtctggagcagcgcgttgtctggcatgccgaacccgtgctaaattgatgtcgatgtcatctagaggactagaatactgacgcggatacggatgccatatccggatatacccgcgccactgagccgcgccacggaggggctgactgatgagcaagcgcgctttgccgctggtggatacccacttccacgtcttcgatgccggagcggccgtgccatcggcccgctaccggccgccctatgccgctgacctgaaggactggcacgcccggcttgccggattgggggacatgtatggggtggtggtgcagaccagctttctcggcaccgacaatgcggcgctgctggccgcgctgcaggccatgcccgggcgcttgcgcggcgtcgcggtggtcggccctgaggtaacggatgcggaactggctacgttgcacgcggccggcgtgcggggcatccgcctgaacctgtacggcgatccggactggcagcgcatcgccaccgtgccgtggcgcgggctgttctccaggatcgccgggctcggctggcatgtcgagctccatacccgcaacggcgatggcgccatggtgctggcacagcttgacgcggcccttggcgataccggcgcgccggtcgtgcttgaccactttggccggcccggccccgcaggaaccgcggacgcgatctttgacgtggcctctgccgtgcgcgcgcgccgccaggtctgggtgaagatcagcgcgccgtaccgacttgcatcccctcaggactggcacgggcttgcgcagagatggcgcgaagtcgtgggcgatgaccgcttgctgtggggcagcgactggccatggaccaaccacgaggcgccggctcgggtcgacgagtgccggatgcttgccgcatggccggggcaaggggcgcccggtgacagcgaagcggccggagtggccttgtccgctgcgctccggtggcgcaacgccgcagcgctgtacgggtttgcggtgaagggatagcgggcggcttgcgccgccggcttcaatccagcgccagcaccccgggaatcgcctccaccagcaaatcgatcgtcaccctcagcttgtgcggcaggaaacgggtgcgcggccacaccaggtgcagcggggtccggatcaccgaggcttgcggcagcacgcgcaccagcgtgccccggtccagcggctcccgcaccagccacaaggggacattgaccaggcccgcgcctcgtatggctgccgcagcgatggtgtcgatatcgtcaaagccgagacggtgagccagctcaggccgcgcgatattgccgtcgggcccggccagtgaccagggcacggactggccgccatgcatgtagacgaggcagcggtgcgaggccaggtcggcaatgctggccggcgtgccatgcttgcgcaggtagccgggcgcggcacagagcaccatagcctgcatgcccagcggacgtgccaccagcatgtcgctgtccggcaggcgcccgctgcggatggccaggtcgatgccgtcgtcggcgaagtcggccagccggtcggtgaaattcccttccagccgcaattgcggatgacggtctgccagctccagcagcagcggcgccacatggtggcggccgaacactaccggggcactcacgcggacgcggccggccacttccctgcgcccggcttccagcatgtgctgggcggcatccaggtcttccagcgcctgggcacagcgttcgtagaaggcctgaccatcgtcggtcagcgccaggctgcgcgtggtgcgcacgaacaggcgcgtgccgacgcgagcctcaagccgggcgatggccttgccgatggccgagcgcgtcagcccaaggcgcgccgcggcctgggcaaagctgccggcctccgcggcggcaacgaaggcggagatcccggccagccggtcatgggtaattggttccataagatctacatgagaaggacatcgattgcccaatggcgctggcagggaatcagtatagtgggttcaccgttttcaacagaccggagtaccccatgacttcctccatgcagcgctggcaactgtccgctttcggccgcaacaacctgcgtcgcgtcgacgcgcccattcccgtgcccggtcccggcgaggtgctggtgcgggtccatgccgtggccttgaactaccgcgacctgctgatcatccaggacggcatgggcatgcccgtgcagccgccgctggttctcgggtcggacatgcgcggcgaggtggtggcgagtggcgatggtgtagccgactttgcccctggcgacgccgtgatcagcaccttcttcaccggctggctcgatggcgtgcagccgcaccgcagcatgccgctgggcgtgccgggtcccggcatgctgtcggagtacgtggtattggcagaggactcgctggtgtcggccccgcgcacgctggacgccgcgcaggccagcacgctgacctgcgccggcctgacggcctggcaagccctggctgaagcgacggtgacgcggcccggcgacaccgtcgtggtgatcggcaccggcggagtggccctgtttgcggtgcagatcgcccgcgcacagggggcgcgcgtgatcgtggtgtcaggcagcgacgacaagctggcgcgcgtgcaggagctgggcgcggcgcatggcgtccatcgcggccgcaccgctgactggccggctgccgtgcgcgagctgaccggaggccgcggtgccgaccatgtgctggaactggctggcggagacaacttcggccggtcgcttgccgcgctggcgcagggcggccggatctcggtgatcggcaaccttcagggggatgagctgcgcgccagcgtctatccggtgctgcatggccgcgtgaccgtgcaggggatcggcgtgtcgcaccggcgcgcgctgcaggacctggtgcgtgccgtggactggttggggctgcgcccggtgatcgagagcgagtacgggttcggggacttgcccgcggcgctcgaccacctggaacgcggggccttcggcaaggtggtggtgcggctgcgctgaggcgcgggccggactgctatttgcgagccttgccgcgcacgctcttcttggccgcggcggcgcgcgccgcttctttttcggccgctgccgccgcgcccaactgctccagccaggacatgccctcgacataggacaggaaatgccgcaggtattccggcgacgtctcgcgcatcagggacagcgaacgatgcacgagatggtcggtattgagcggcccggcattctccggcacgcgttccagcgacaggcggaagtgctgctcgacgctgaccctggcccaggtctcgcggaagtagtcggccagggcgtcgaccagcggcgcgtcggactggggtgcggttgccggcaccggcgtgggcgatcgtgcatcgttcgaggcgatcgcgatggcgggcctggcgcgtgcggtgatgtcgtgcacgagtgcgccaagcgcgctggctgtcgggccggctgttggcgcggacggcgcggcaccatcggcaccatcgctatcctggcctgtgtgccgctgcacgatggctgcatacgcggcggccaggccacgcaggcgctcatccagcaagccccgcaccgcgccactgtgtgcggcggcgcggcgggccagtgcttccatcaggcggaagcgcacgggatcggcctgatcggcgccgctggcctgccaggcgtccagttgcgcgcggatatcggttgccacgtcgaggctagccatgcggcttcacggtgcccgcggtcacacgcggcaccggcgagatctcgacgcgccggttcttcgcgcggccctcggcatcggcattcggtgtcaccggctgctgcgaaccgaaggcggccgagaacaccgaggtgggcgggatgccggcatcgatcagggtgcgggtcacggtcagcgcgcgctgcgccgacagctcccagttgtcggcaaagcggcggttgccttcgcgcacctgctggtcgtcggtaaagccgctcaccatcaggatctcgtcgcggctgcgcaggtaggccgacaacggctgcgccaggctcttcagcagatcgcggccttcaggttgcagctggtctgagttgagcgcaaacagcacgttgccgctgatgccgatgcggccgttcaccagcgtcacgcggccggccgccagcggcgccgccagcgccttttccagcgtctcgcggcgctgtgcttcctcctgccgctgcttcacctcggcttccagcctggccgacagttccatctgcacgccgatgacccccagcaggacgagcacgaacgcgcccagcagcaccgacatcaggtcgccgaagacggcccaggccggtacggtcggctcgacgccggcgtcaaggtcctctctcatgccgcctctgcgctgggcgcttgctggccggcgcgctgctgcaggtcctcaaggatctgcttttgcgacagcatgctcaggtcgacgacttcgcgcgcctgcgccacgtagtaggccagttgctcgtcgctgcgcgtcatcgacttgtccagcgcggcctcgatgcgctgcaggtggtcgatcagcttgccgttggattcgctgaacagctgcaccgccacgccgaaggcctcgcccaggctcgcgacttccaccgcactgccggtgacctgcgcggcgatgtcggtgagcttgccggtttcggcttcgaccttgtcggtaaagcgcgtgccgacgcggtccagcaggtccgccgtggtggcgaccagggtgtcgaccgcgctgcgctgctcagtggaggcgcggctcacggcatcgagcagcgtgcccagcgtttccagcatgcggctgcgctcttccagcatggcgttgtcgcgcgccatgccgtcggtgagcttctcgcgcagttctgcgatgacctccgcggcggccttgggcgcttcggatgcggcctgcatcaggtgggcgacttcggcgatggtgccggtggcctgggcctgcgcctgggctgccatgtcgcgcgcggtgacggccagcgtctcgcagatttcctgctggcggctgacggtgtgcgcgctggcctgttcccattcctggcgcagcgatgcggccatggtgccaagcgtgtcagtccaggcggccatgcgttgcgcgtcctgcgatgccagttccgcctgcaatgtggtggcggccttgggtgcctcggccgcggcttgcaccaggcggtcgatttcggcgagtgtggtgctggcatgcgcctgcgtctcggtcgagatcgcgcgcgcggtctgcgccagcgcctcgcagatctcctgctggcgcgtggcggcgtgcgtgctggcctgttcccactgctggcgcagcgtggcggcgatggtgccgagcgtatcggtccagccggcaaagcgctgctcatcgcgcgcagccagctcggcctgcagcgcaacggccgcctttggggcatccgttgcggcctgcaccagacggtcgatctcagcgagggtgcggctggcatgcgcctgggtctgggccgagatgtcgcgcacgctctgcgccagcgtcgtgctgatctcgtcctggcggcttaccgtgtgcgcgttcagctgttcccattcctggcgcaacgcggctgtcatggtgccgagcgtatcggtccaggcggcgaagcgctgtgcatcgcgcgcagccagttccgcctgcagcgcgacggccgccttcggcgcgtccgacgcggcttgcaccaggcggtcgatttccgcgagggtctggctggcatgcgcctgggtctgggccgagatgtcgcgcacgctctgcgccagcgttgtactgatctcgtcctggcggcttaccgtgtgggtgttcagttgctcccactcctggcgcagcgctgcggtcatgctgtcgagcgtatcggcccaggtggcaaagcgctgttcgtcgcgcgaggccagttccgcctgcagcgcaacggccgccttcggggcgtccgaagcggcttgcacaaggcggtcgatttccgcgagggtctggctggcatgcgcctgggtctgggccgagatgtcgcgcacgctttgcgccagcgtcgtgctgatctcgtcctggcggcttaccgtatgcgcgttcagctgttcccactcctggcgcagggcagtcgtcatggtgccgagcgtatcggtccaggccgacaggcgctgcgcgtcgtgcgcggccagctgcgtctgcagcccggcatgcgactcgcccacggtgcgcaccagtgtcgccgcatgctcgccgaacgcggctgcggcggccgtcagggcctgccggttgtcgccggcgagcttctcgccggtgcgctcctggcgcgccagcgcctcgcgccatgcgtcggcagcgctggcggctgccgtgtcgagccgggtggcgacattgtccagcagcccggccgagcgttgttcaaaggtctgggcaaagccgtcgagggatgtgcgcaggtccgctgccagtgcctcgctcgcgcgttgatgcccggccagcgcctggttccaggtatccgcaacgcccgcggtggcgctctcgaagcggctcgataccccatccaggtgctgttgcacggcttgggtcacgttgtcgcgcaaggccgaggtttcgcgtgccaggcccgccatggtcgcgtccaccgcgggctggatcgctgcgcttgcggcacgggcgctgtcggcgatgctgtccttcagcgattgctcgaccgaagacgccaggcgcgtgtagaccacttcggtcttgccgtggaaggcgtcctggctggcggccaggcgctcggtcagggcctggttctgttcggccatcgtggtcatcatggcctgcatgcgctcgaccagtgccggcatcacgtcggcctggcgctgcagcagccggaccgcttcatcacgctggtggccgcgcgagtagggacgcagcgtggtggcgatgcgggcatccagcgcctgcgcggcctggatccgctcgcgccggcacaatgccgacaacaggcccagcatcgcggacgtggccacgcccgcgaccgaggtgccgaacgcaaagcccaggcccttgaccggtgcggccagcgaggcgcggatggcctgcaggtcggtggcggtctccagcgcgatgccggtgccgcgcagggtcgccaccatgcccaggaacgtgcccagcatgcccagcagcaccagcaggccgaccaggtagggtgtcagcgcggggccgggcaggccgacgcgctcgccttccacgcgcaggcgggcgctgtcgcgcaggctgggatgcagccgttccagccagttgccaaggctggccggcgcttcggacaatccggcgacggcctgcgccagcgtggcggtggcctggcggtagcggtacagctccaacgcccccgccaggtagcagccgccgatcagcagcgtcacggccagcgccaggaagttcgtgcctgcatagccggcggcgatccagcacacgatggccaggcccgccaggaaagcgacaatatgggtaaggtatcgggtcatgatgttctggttagctgtcctgcagcgccgccagcaagccttcaaggggctgccagcggatgtcgagttcggcgagcaatacgctctgcatatccttgcggaatacccccagccatgcaccgggcctggccgttgcgggctgtcccgcggcctgggcttcggccagcgccgcggcttcggcctggcgcaggcgctggaagtgcggctccagcatcgtcggcacggcgcccagcaggctctgttcgcgcgcgcccagcacgcgctccatcacggcatcgaccatggccagcttggccatgccgggtgcgtggccggacaacgcgccgcgcaggcgcccgcgcaggtcgccgatcgcggtctccatggtctgttgcagcgtgaggtagcgctggcgatagaccgcgtagtcgacctgcgcgtccacggggtcgggcagcgcggacggccggcccggcccgcgccgcttgccggcaagcgtggtgtcttccacgatggcaccggccagcgcggcgcgcacgcgcgcgcattcgcgtgcctcagtgctgtcggcagcacgtgcggcaggcggcgttgccggcgcattggccttcagcgccgatgacagcgcgatcgcgtccgcccagccaagccattggctcagctggctcgagagcgagcttgcaggaggaggggcatcggcgtcagtcaggcgagccagcaggcggacgagcgtcgggccgctgaaacctgtgcgccggggcacttgtaacattgcgccggattcgaaaaatccagcagtttacacgcccgggcggtggcgtggccggctggcgtggtggatgattggcgggaatccgtcccggacccatcccaccacggagtgaaaccatgagactggttggcatgcttgattccccttatgtccgccgcacggcgatctcgctgcgcctgctcgggttgccgttcacgcatgagtcggtgtccgtcttccgtgaattcgagcgcttccatgccatcaacccggtggtcaaggcgccttcgctggtctgcgacaacggggtcgtactgatggactcgacgcttatcatcgactatgccgagtcactggcgggccgcagcctgatgccggcgcaaaccgcgtcacggcaggccgcgctgcgcatcgtcgggctggcgctggcggcgagcgagaaggtggtgcagaacttctatgagcacagccagcggccggcgggcaagctgcaccagccgtggctggaccgtgtcgatgcccagcgcgagagcgcctttgcactgctggaggcggaactcgccacgcgtccggtcccggctggcgaggcggaaaccggccaggccgagctgaccgccgcggtcacctggaccttttcgcagttcatgatgccgggcgcggtcgatccggcgcggcatccggcgctggttgcgctgaccgcggcgcttgagcggctacccgcattcgaggcattgccctgcgcatagttggccgctggcgcgcctaccgcggtagggtgccaatcgcaggcattccgatgcaacatcagccccctgtggaacgcgctgcaccggcttcctctgcgatacgcgcagcctattcggcctgtaagcgccaggcgccggggcttgccccggcgccggcgtgcccatgtgcagtcaaggtaatacaatccacctgaccaggcgacgagaccaatcgacaagaccatacgcgcgaaccggggtgggaactcatgacaagaagtcaaggcgccgcagagaacaacaacgacgccagcatcgacgccagcgcgtgccgcaactatgccatcgtggtggatgaccacccgttgatggcgcgcggcattgccggctaccttgcggcgcattgcgggtttgacgctgccctgcatgcagccgatgcgcgggaatgcgcggcgctgacggaacgggagggctgcccggcgctgctggtggtggatttctggctgccggacggcaccgcggtcgggttgctgcgcgaagccgcggcgcgcctgcccgcctgcaagctgctggtgatgagcgccgacgacgatgcgcgcgtttgcatcaaggcacgcgaggccggcgcgcacggctttatcctgaagaacgagcctccggaggtgttcgccactgcggtggcgtcgctgcgccagggccggcgctggttccagcaggcggggccgccgtcggcgcggcgcgagttgccgctggagcccagcgaactgggcctgacggcgcgccaggccgaggtgcttggcatgatgctgcgcggcctgccgaacaagcgcatcgccatgaccctgtcggtgtcggagcagaccgtcaaggagcatgtcaccgcgatcctcggcaagctcggcgtgcgcaaccggatcgaggctatcgccctgctgcacggacgcaggctggagtcatgaagaaggccctcgcccggctgctgggcttgtcgcgcccggatgcggatgccggcatcagcccgcgcgcgcgtgcgcggttgctggacatgacgttcgggcgcctggtgttcagcgtcaatgcgattccgttcgtggggatgcctttcgtcatctggctgtatgtccagaagctggacggcggcgcgctgctggcctggacactggggtatggcgccgcggcggtgtggatgcaattgcgcttccggcgctacaagcaagagcgggaagacgatgacgccctggtccggcgctggctgccgtttgtgcagcgcgtggcgctggtgcacggcttctgcctgtcgctggccgcggtcctgacggccagcctggggggctttgacttcaagctgctgctgtatatcagcatcgccgccatcgtggcggccaatgccacgcaccagacgccgatcctcggtgtattccagcgcttcttcgttgcctgctggactttgcagatcgtcaacaccccgcgcagcttccctgagcactggccgttcgtgctgccgctggcgctgctgtatgcgctggccatctaccggcacgcgctgatcgccaaccagttcttccggcagcaggtacggatggaggatgacggcatccgcctggccgagcgctaccggctggccaaggaagaggccgagaaagccctgcaggccaagaacctgtttctcaccaccgccagccacgacctgcgccagcccgtgcatgccatgggcttcctgatcgaagccattgcgcggcgcaaccgcgacccggccctgatcccgccgctggacgacctgcggcgcagcgtgcgctcggtgcacctgatgttcaactcactgctcgatctgtcccggatcgaaggcggcattgccagcccgcgcaataccgccgtggcatttgcgcccttggtcgaagaggtggcgtcgctgttccgggaagaggcgcgcagccgcggcctggacctgcgcgtgcgcctgcccgcaggcgccgccgcggtgctggccaatcccgcactgctgcgccagtctctggtcaacctggtgcacaacgcgctgcgctataccaagcgcggcggggtgctggtgtccgcgcggcggcgcggcagccactggctgctggaggtctgggacaccggcgtgggaatcgcgatcgaagagaaggggcgggtctactcgccgttctatcgcaacgaacatgcgtggcgcatcgacagcgcgggccatgggctgggccttgccgtggtggcgcgctgcgccaccctgatgggcgccacctacggcctggactcggtggagcgccgcggctccaggttctggctgcgctttcccgaagcgaagccgctggcgccggcggcgatcgagccggtctacgaacccgaaggcctgtcggcgtccaccctgctgcagggcgtctgcctggtcgtcgaggacgacccgctggtgaccgccgcgtggaccagcctgatggaggcctggggcgtgcaggcggcgtgcgcggcgtcggggcaggaagccctggcactggtcgatgccggcctgcagccccaggcgatcctgtgcgaccagcgcctgcgctccggcgagagcggcttcgaggtgctcaaggcgctgttcgaacgctgcccggacgcaagcggcgccatggtcagcggcgagttcgattccgaggcgctccagcaggccgagcgtgaaggctatctggtcctgcacaagccactggagccgtcgcagctgcatgccttgttgttccaatggctttgtgctgcctgacagcatagatcggtggttctgcttgcggcggtggccccactcaggcatctccggggcgaaagaagtgtccggatcgactttattcagatcacctgaagaatttatttagttcacttttttccacctctcagcgacagtctagcgaccgcaaatcgcgatactggaaagagagggccccatgtctatctcaaaccgcgccgtcggtgcctcggtgctggccgtttccatgttcgcgggcctggccggatgcagtaacccgccggctgcggcgttggctgccgcgtcggctgtctcgtcgggctccgcgccggccgcggtgtcggaacaggacatcaacgatgcctacatctacctgctgggccggctgcttgtcctgcgccagcagcaaatcgacttccggaaagaaggtttccagtggaaccggatcattcatcgcgacgtcggcggtgtgtcgtgggccaaccccaatctggatgtcgcctacagcgaggcctggattgcggtcgacgaaaagacctgcacggtcttcagcgtgccggccatcaaggggcgctactacaccattcagttcctgaacggctggggcgaaaccgtcgccaatatcaacgaacgcaactatccggaccatccaggcggcgaattcgcgatgtgcctgaagggtgccactgcggcactttcgcccaatgccaggcgcatcgacctgccgggcaagacctcgcgggtgctggcccgggtggaaatcggcgcagacaagaagcaggccattgccctgcagcatcggatcacgacacggatcactggcacggcgacgattgccccggtacctgccacgcccgccttcagcaatgacaagctccccggcgttgaagcctttgactcggcagccgttgcgcttcgctccgagccggacatcaatccgggcatggagcccatccaggccaaggtgcgcgcggtgagtgccgcggtggccagcagcctcgccgaacgcgcgcgggtggacaaggtcatccgcgagaagacgctgccggcgttcttacagtcgttctccaccgcaggtaccatcaggaacggctggaaccggcccgctaccatcggcaagtacggcagcgacttccagacccgcacccgcatcaacctgggcgggatctgggccaacagcacggatgaggtcgtctatttcaagacggatgcagacgggaccggcaccaagctcgacggcggcaatacctacaccatcaccttcccgaaggacgagctgcccgcgcgccacgtcaaatacttctggtcggtgattgcggtggatgccaaaaacttccgcgtgatcccgaatgcgaagaaccggttcctgatcaacaagcagtccaggctgagctatggcgaggacggttcgctgacgctgtacttcgcgcctgccaggccgaaggacgcgcctgacggcaactggctgcccacgcccaagggaaagaattaccacctgacgttccggctctatggggcggaccagccggtcctgtccggggagtggttcccggcgccgctggtcaagcgcaactgagcgggccagtcttggcaggaaggcgcctgccagtgctggcctaatcctccgccacctcgcaaaaccgcagccggttcccgaacggatcggccacctgcagcatccgcccccagcccacatcctccacaccgggcctcgcgtacggatagtccttggcagacagctcctgctgcagcgcatcgacatcctccaccgtcacgaacaccgtcgatccgggcgtggcgtcgccataatgctcgctcaggtgcagcgtcaggccgctgcgcctgacctgcgcgtacagcggaaatccctcttcataccgatgctcccagtcgagcgagaagccgaggaagtcgaggtagaactccttggccttgtcgaccgagaagatccggaggatggggatgccggcagacaggttcatggttttcgttcggtagttgcgcaggaatggcagatgatagcgccggcccgcggtgatccgcgcgcgcggcgcataagcatccgcgacaatcttcgttggctttgtgcgggcccgtgactaagctggcgctccaatgaaatcccggaacaccgctatgaacccgacccacgactcacgccgccgcctgcttctgacggcagcgggcgccgcagctgccgccagtgtgctgccaggcgtcagctgggggcaaggacagaccgcgctgcgcatcggctaccagaagtcctccacgctgatgatcctgctgaagtcgcggcagacgctggagaaggcgctggcgcccaagggggtgacggtgcagtggtacgaattcacctcgggcttgccgctgcttgaagcgctgaacctcggcaatatcgacctgagcgccgacgtggccgatgcggtgccgccgtttgcgctggccgcgggtgccgcgctgacctactacgccagcgagacgccttcgccgcaggcacaggccattgtcgtgcgtggcgactcgccgatccgcgaggtggcgcagctcaaggggcagcgggtggcatttgccaagggcgcaggcgcgcactacctggtgctggaagcgctggcgcgcgcgggtctgtcgatccgcgatatcgaaccggcatacctgagcccggccgacgcccgcgcggcgttcgagcgcggcagcgtggcggcatgggtgatctgggacccgttcctggccgcggtgcagcgccaggccaatgcgcgcttgctgcgcgatggcgaggggctggccagctatcggcgcttctacctggcggcgacgccgttcgcgcgcgcgcatgccgaggtgcttgaggtggtgttcgatgcgttgggcgacgcgggtgactgggtcaagcgcaatccggccgaggcagcgcgctggcatgcgccactgatcggcctggatgcggccaccgtggaagccgcgaacgcacggcgcagctatgcggtgcgcacggtcgacgccgccgcgctggccgagcagcagcgcatcgccgatgccttcaccgcgcagcagatcctgccgcgcaaggtagcgatttcttcttcgccagtctggcgcaaggcctgaccgggtccgagcatcgcccgtcagggaagcgtcatatgccagcgggcacgccatcctgtgcaagcccggcgaacgtatttgccagccacatcaggcccgcatcattgtcccttgccgcggaccagactgcggtcaccgtgaagtcaggcatcggcacggggcagggaagctggcgcaggccttcggtggcgcaccattggtccgccagcaccgccggcaccgttgccagtgcagcggttcccttcaggatggccggtacgctggcgaagcgcgcactgctgtagcgcacgtcccgcgcctggccctgggtggccagccacgtatcggcggtgctgtcgaaagcgccgcgatatgacaccagcacatgcggaaaccgcagatagtcttgcagcgacaggatctggcaggcatccagcggcgcggccccatagacgcagcgaaagcccatggtctgccaggcgcgctcgcgccgccatgccgcgcccttggcgaatggcccgataccgaggtccatctcattgcgctcgagcatctcggtgccacggaacgggtccgtcggcacgatggccagtcgcacgcccggcgcgcaggtgctgaggctcggcagaatgcgcggcgcgagccatagctccacccagtccggcatcccgaccacgaaagtccggtccgacgtaagcgggtcgaagtcgcgccgctgcagcagggcggcctcgatctcgccgagggccggcagcaggcgccgctcgagttccagtgcgcgctcggtcggctccatgccgtgagcggtgcgtaccagcaacgggtcgtcgaacatctcccgcagccgtgccagtgcaccgctgacggctggctgtcccaggtgcaggcgcgccgcggcgcgcgagacgctgcgctcgcgcagcagcacggtcagcgttaccatcaggttcaggtcgacgccgcgaaaatggccttccttaatgctcatctgctaccctcccccgcagatagggcattggaacatcgcgtgcaatccgcggcaagccggccgtcgtcatgccagggccggcgtgctgacgggtgggcggcggtgcccggtcgcgcgctcgaaggccgacgcaatggccagcagcacggcatcgctgcgtggacgtccaagccacgacaccccggctgggatgtcagccgacgtgaatcccatgggtacgctgacctccggaaagccgctggcgcttgccatatgcattgccgccagcggctgctgcgcccggcaatggtaagtggcgtccgccatgtcaaagcgcggcgaggccgggcaggccagcgtgggaaataccagggcctccaggccacgcccgcgcaggatgtcgtcgagcatggcgccgaagcggcgtgccgctgcaacattggcttggggcagcgtgtctcgcatctcgaacgcatgccgcagcgcggcaagcgtaagcgggttcatttggtgcgcatccgtggagaggtccgtggtggtgatgtgcgccagcagtgcggccgtgctggccggagcaccgcccggcaactgtcccaggtaggcatcgagcccacgcacccattccgcttgtacgatagcgtccagcaggtcggcgtagagcgtgagcgccaatgccggcagacgcacgggtatcgtcacggcgcccgccgcccgcatcgcctccgttgcggttgcaaagagcgcgtcgacctcgtcgctgcctccggcgaagtcggtcacgatgcccagcctgcggccagccagcgacgccggctgtgcgataacgcctgagcccggcaccagtgcatccaggaccatggccgcatcgtcggcgttacgggccaagggcccgacgatatcgaacgatgtggccagcggcagtacgccggccgactccaccaggtcatgcgtaggccggataccggccagcgcatgcacgcatgccggaccgcgcacggagccgaacgaatcggtccccagcccgaacgccgcgaaattggccgccactgccgcaccggtgccgctgctggaaccgctggcgttgcgggataagcgataggggttcaacgtcaggccgttggcagagctgtacccgaagcgcccgttagaggcggccagttccgacatgttggtcttggccagtacgatggcaccggccgcgcgcaggcgcgccacgcaggccgcgtcggcgcgcgggtaggcctgccgcagtgccgcgcagccggcagtggtcggcatgccgacagtatcgatattgtccttgaccaccatcggtatgccgtgcagaggcccgcgcgggccgtgcgtgcgcagttcgtcgtccaggactcgcgcctcgtgcatggcagcgggattgatgcaactgatcgcattgatgcgcggcccgtccttgtcgaaggcggcgatacgcgcgaggtagtagtccaccagacccgctgcgctgatccggccggcgtgcatggcggcggcgagttccccgatggaggcctcgagaaggtcgaaacgatcaggcacaaggcgaggggcggcagcaggcatcggagtcatcggcaatcaggcggcatgacgccagtattggtgcagccgtgccggcaggcaatggaagttttgtccatgcttctttccttcagggaatgaatggatgacaatgccagcacgcgaacggcccctcaaaccgaagtcggcttcccgtcacgccctaccgccatgaaaagtacaaacggccgccacctgcctgcgctggcgaacctgatcgcattcgagaccacggcccgcacgggcagcgtcaccggggcggccgaggaactctgcctgacgcagagcgcggtcagcaagcagatcaccgagctggaatcgttcctcggcgcgcgcatgctgaaccggcgcaaaggcgcggtggcggcgacacccgcgggcgaggattacctcaggaacgtgcgcaaggcgctggcgctgctggaggaagcgaccatggaggtgcagtccggccgcgccgcgggcgggcggctgaacctgtcggtgccggtttcgctgggcaatatctggctgttgccgcgcattctcaggttcgtcaaggcgcagccgcagatccagctaaacgtcacgaccaaggtggggccggtcgacctggaaagcaccgggctcgatgcggcgatcatgtattgcgcggggccgccgccacgccatttcagcctgaaggtcatgccgctggtgctctatccgatgtgcgcgcctgagttgctgcctggcggcggaacgctggccaaggccgtgaagcgcttgccgctgctgcaccagatcgccgcgctggaggcctggcccgcctatctccggcaggccgggatcaagctgccgcatcccgacgacggctcacgctatggtctgctgaccatgggtctgcaggccgccgtcagcggcatgggcgtggccctgctgcccgattatgtggcgggtgaagacatcaaggccggccggctgctgcgcctgtccgacgagccctatgtctcacccaaggcctactacttcatctgtccggaggacaagcgcgacaacccggcgatgcagaccttcatcgcgtggctgcttgagcaaagcgccgatgcaagcgggcgctaggtgaagcgcgtcctcagccggcctggtccgccttcaccagggtggaagtgacgaagcgcccgggacgggtgctggccggcaggccgtcgcgcagggtggcctcaccggcgacgaacacatgccgcacgcccactgacggctgctgcgggtcgtcgaaggtggcgcggtcctggatcgttgccggatcgaagacggtgatgtcggcgacatggcccggcctgagttctccacgccgctccagtccaaagcgctgcgccggcagtccggtcatcttgtggaccgcgcgttccagcgggaacaggcccaggtcgcgcgagtacagccccagcacgcgcgggaacgtgccccacagccgcgggtgtggggtttcgtcggagggaatgccgtctgagccgaccatcgtgtccggataggtcaggatgtcgcggacgtccgtctcgtccatgatgaagtaaaccgcgccgcctggtaccagctgccttgcaacctcatggcgcgtctgcccccactcctgcgccaggtcctccaggtagcgccccgcggcctcagggtgcggggccgaccacgtgatcaggatgcggtcgcactgatgcacccgttcgggccgcagcatggtcgatgacgccgcatacggatagcagtccaggcacagcggcatggtttcggccaggttgcgcacctgggccagggtatggcggctgcggccatggttctgcttgcctaccagcttgtggtgcgagatgacggtcgatacgcccagcgccttgccaatgcgcgcggtctcgtcgatcgactcgctgatgttgtcgctctcatcgcgcatatgcgacaccagcacaccgccgagccgcttcatcggctcgcacatgcgcacgatttcatcctcgggtgccgcggccgaaggcggatagaaggtgccggtggacactccgatcgcgccttggcgcagggcgttctccacatcctggcgcatgctctcgatctcggcatcgctggcgggcaggccgagctgtcccatgcgcctggcgcgcagcgtggactgccccaccagcaccgcgacattcacagccgccggccgcaccgcaaacgcttcccggtaggcgcgcacagaatcgaagcggtagccgccacgcatgatgtcgagcggagccggcggaatgctgtcggtgaccagcgggaacaggctgatgccgcagttgcccgcgatgatggtggtcacgccctgcgtgaccttcggcagcatgtcgggggactggaacaccatccagtcgtcgtgcgtgtgcgtgtcgatgaacccaggcgctacgatcaggccggtggcatcgacttcggtatctgcccgcgctgccgcgaggttgccgatggcgacgatctcgccatccgccacgccgacgtcggccgtgcggcgcggcgcgccggtgccgtcgatgacgtcgccattgcggatgatcagtttgaagtgcaggtcttggtgcgtttgcatggtgttctctctcaatcgaccctggcgccgctcttgcgcaccagctcgccgaacttgacggtctcgctcgcgatcagcgcctggaagtcgcgcgcggtgccgcccagcggatcgaatgagagcttgtccagttgggcacggaatgccgggtcattgatgatcgcgttgatttcccggttgatccgctcaatcacctcggtgggagtgcccggcgcggcaaccaggcccgcccatgccgtcagttcatagcccttgaggccggcctccgccatggtgggcaaatccgggaagtgcggcgagcgcttgcttgaggtcaccgccagcgcgcgtacgcggttggacgtcacgtacggtccgatcgaaggcacattgtcgaacatcaactgcacgttgttgccgaccaggtcctgcagcgccggcgtgctgcccttgtagggcacgtgtgtgatgctgagattggccatgaccttgaacagctcgccgcccaggtggctggtggtgccgttgcccgccgagcccatggagagcttgcccggattggcgcgggagtatgccaccagttccccggtggacttgaccggtagcgacggattgacggcgaggatgttgaaggtcgtgaccaggccgacgatgggcaccagcttgtccggatcgtaggggagcttgctgtaaaggaagcgattggtcgacagcgtggcattgttgccgtagccgatcgtatagccgtccgacggtgcggccagcagcgcctgcatgccgatatttccgcccgcgcccggccggttctcgacgattacggcctggccgaggcgcctggacagcgcatcgccgaacaggcgcgcgacgatgtccggcgcgccgcccggcgcggtcggcacgatcaggcgcaccggcttctccggccacgccgcttgcacggccgccggtgcccatggcagcgcgccgaagatccccgcggccaggacttgaactgctgacttcctcatgctgactccctcgtcgtcgtggtgtaactgtggacgagtatcggcgacggccccgtgcgggcctagtgaagttttttgatgcgatagtttccgtggcggaatgaatgacgcgggcgccacagggctcgcgcggcctccgctgcggtatcgcctgtagcgataccggcaatcattccaatcgatttgtgcgatgccgtcgcggccgccagaatcctgcacaacacgcgggcatccctttcgctcgcggtcattttccaggcaaacacaatgaacacacctcattccccggctaagccccccctgtggcactgcgcacttctggtcggtatgctgctctggtcagtggtagccatcccggcacatgccggcgcaccccaggtcggcgcgcaggcgcccggctactaccgcatgaagctcggcaagttcgagatcacggcgctgtcggacggcactgtcaacgtgccgatcagcaagctgctcaagcatgcgttgcatgagcacattgcgtcggtgcaggcgcgcaactaccagtccactcagcccgagacctctgtcaatgcgttcctggtcaacaccggccagcacctggtgctggtcgatgcgggcgcgggcagcctgtttggcccgggcgtgggcggcaagctgccggacaacatccgtgcggccggctaccagccggagcagatcgatgcggtgctgctgacccacatccacgtggatcactccggcgggcttgccgtcgatggcaaggccatattcccgaatgccgtggtctacgtcgaccgccgcgacgctgagttctggctgaatccggccaacgccgccagggcggcatcgggccagcggcacaacttcgcgcaggcggaggcagtgttcgcaccctatctgaaagccgacaaggtccgcagcttcgacgacgagcatgagctgtttcccggcatccgtccgctgcgcatgccgggccatacgccgggccacacgttctatgagatcagtagcgaaggacagcggctgcaactgtggggcgacaccatccatgcgcagcacctgcagttccccgagcccggcgtagccatcgatttcgacgtggattccacggccgcggtgaagatgcgcaagcgcgccatggcggatgcagcggccaagggctattgggtgggcgcggcgcatatctccttcccgggtatcggccacgtgcggcgcgagggcaaggggttcgcgtgggtgccggccgaatacagcatggggcggtgaggctgtcaatgcgatggctgtacctggcaagtcgatgcgactgcgccttgatcctgcatgctgcatgcaagagcccgccacgccgaggcacgacggactccgctcatccccgcaggcagggcatcaaaccactcccatctccggatcgctgaccgcgtcctcgccggtctccatccgccccgcaaggcgccgcgcgaacgacgggctggcctcgcaggtcacgacgaagtcataccagttgccgctgtcggccaccggccattccagcgtttccaccttgccccgcttcaggctttgggtccacgggccgtcgtcgcggtaggccagcgccgtgacggtgaaggtcacgtcggcatcgctgtcgttatgcagcttcacctggatcgtgggcttcctgcacgggttgtagcagacctggatttcggtggacgtggtcaccgcttcgttgatatcgccggagaacgagcggtgatagccgttgggccccagcacccacaggtcgtacttgccgccgtcggcattgatgttccacacgtcgtccagcgtcttgccggcttcgaccacgtagcggcgcggaatgcggtcgaggtgcagcttgtcatagacgtggaacagcgcgccggcctggttggtgctggcgttggcgaacagcaggcggactgccttggatgcggcatcgacgcgtgcactggtatgcagttcatatggcagcttgcgcgacggacgcgtgccggtgtcctgctcaggcagcgcgggcgtggccggcaccgggatcgccggctgggtctgctgccatgcggtcaggctggtggcgtcggcacgggtggtgcggccggccagcgtgggcagggtctcggtgttgggcgtggcaaagttgaaggcgctggtcaggtcgccgcagatggcacgacgataggcgctgatctgcggctccatcacgccgaagcgcgcctccaggaagcgcagcaccgaggtgtggtcgaacacttcagagttgacccagccgccgcggctccacggcgacaccacccacagcggcacgcgcgggccggggccgaagggcttgccgtcctgcggcggctgcttggccgtggcgggctggaagttgaagtactcgtacgccatctgcgcgtcgtcgagggtcgacttgccggccagcgtgccgtccaggttgcgcgacggcgcggtcggcggcgggctgtggtcgaagaagccgtcgttctcgtcgaagttgatcagcagcacggtcttgctccagacctcgggcgatgccgtcagcgcgtccaggatggcctgcacgtaccagccgcccttggccgggctggacgggccggggtgctcgctgaactcggccggcgggatgatccacgacacctcgggcagcttgccgttgagcacgtcgtcgcgcagcgactgcaggaagccgccgtcggacatggtgttgcagaagcccttggccagcgggctgtactggtcgtcgatgtcggggttgtagggcgggttgacgccggtgccggcggtgttggagagcttgcgtccgacgggcatcttctccatctctgcgcgccagtgccggaagctcatcatctggttgcagccatagttgtccggcacgttctggtagaccttccagcccacgccggcggcctgcaggcggtcggcataggttttccaggtccagccttcggtggaggggccaacatccgcgcccgcgttgaactcgttaatcatcaccgcgacgttgtcgccggtgggaccattgctgccggtccagtagaacaggcggttgggaatggtgccggtgtgcatcgcgcagtggtaggcatcgcacagcgtgaaggcgtcagccagcgcgcgctggaacgggatctcggcgtcatcgtagtagcccatcgacagcgctttcttcgcgaccggccagcggtccatgcgcccgtggtcccacgcggcctgcgcatcgggccaggtgtgcggcgtgccgcccgcgcgctgcgcgttgccctgggtttcgtcgagatggtagggcgtcaggaggttgccgttggcatcggtctggtagaacgcgttcttgccattgggcaacgggatcgcgaagcggtcgccgtagccgcgcacgcccttgaaggtgccgaagtagttgtcgaacgagcggttttccagcatcaccatcacgacgtgcttgacgtcctggatggtgccggtggcgttgttggcctcgatggcgagcgcgcggcggatgctgggcggaaagctggccagcaccgcggcggcggcgccggtgccgaggctggtcttgaggaaatgtcgcttagacgggttgaaggtcatggctgtcgctggtcggtctgtcgctggatcggaaagcgggcccgcatcacggggcgcaacgcgtggtgcaggtgccgggctggtcaggcttgcctggctggtccggcttggtgccattggcgccgctgggctggagggtgccgcccgtcgcgcccggcgaatcgtcgccgccgcaggcggtaagcatcagtgcgagggtgagggtgccggccgccagccatggccgggcggaacgcgacagcaatgaaggtctcatgtgtgcatgccctgtagtcgttgagggggataacgattgccgagcccatgcgccgacatcggatgcaggcccatggacttccgccgcgcggacgacaagcgcggggaactggccggttcgggtgcggttggccttggcttgtcgtgacagcgagcgattgttgattggtcaaatgtcagatgtttgacatcaaacacatttggcgatttggttttgtaaccaaaagtgtcgcgctggcagagttggcaattgctggctggccccgcccgctctcagtcaggctggcgtgcgtggggccccatcgtgtgcacacaagcggcacctgaacgcgatcgggcgcggcgcgctggatgccgaggcgctggctggcgacatcagccgggccacccagtcgcaggacatccgcgaaggcgcgctggcctggaaggaaaagcgcacgccgcagttcaccggcacctgatgcagcttactgcgcctgccgcatcacccattccaccgcccgcgccaggaacggtgacgtgtcgccttcgcgatagctcatgatcaccggcgacacgaagcccggcgcgtcgatcgggcagtagcgcacgtcgtcacgatgcaggcgctggatcgaggccggcaccagcgtgatgccgatgccggccgccaccagccccagcgcggtctgcagttcgttggcctcctgcgccacacgcaactgcaggccctgcgcgcggaacatcgacagcaggtggtcggcatagctgggccgcggccgggccgggtaaagaatgaacggctgcgccgccagcgcctgtggcgtcagcgccttgcggcgcggcgcgggcaggcgtgcgggcagcgctgccaccagtggctcggccatcaccacctgctggcggatggcgggatcgttcagcgcgatgcggccgaagcccaggtcgatgcggccggccttgagcgcctcgatctgctccacggtgatcatctcggccagtcctacctctacctgctggtcgtgccggtctgattcgcgcagttcgcggatcagttccggcagcacgccatacagcaccgacggcacgaagccgatgccgaaccagcgcttgtcctgccgcccgatgcggcgcgtgccttcgatggtttcttccagccgctgcgtcagctgggtggtctgctccagcaggaagcggccggcctcggtcagccgcagcccgcggccgacgcggtcgaacagtgccacgcccacttcttcttccagctggcggatctggcgcgacagcggcggctgcgccatatgcagccgctcggcggcgcgggtgacgttgagttcctgggccacgacctggaaataacgcaggtgccggagttccattggtgtcctgctcccatacctgtagggtatcgattgagacatcatcggtcttggacgccggcaaagtcaagccgcatacttggcttcaatgatcaattcgcatcgacaaggtatgaccacgactatcacttcggtggaagccatcctggtggacctgcccaccatccgggcacaccagctggccatggccaccatgcagcagcagacgctggtgatcgtgcggctgcgctgcagcgacggcgtggagggcatcggcgaggccaccaccatcggcggcctgtcctatggcgacgaaagtccggaaggcatcaagctgaccatcgacacctacctggcccccgcgctggctggccaggatgccaccaacgtgcatggcgcgatggcgcgcctgggcaaggtcgcgcgcggcaaccgcttcgccaagtcagcgctggagaccgcgttgctggatgcgcagggcaagcgcctgggcgtgccgctggccacgctgctggggggcgcggtgcgctcaaccctgccggtgctgtggacgcttgccagcggcgacaccgcccgcgacatcgccgaggccgagcaactgctggccgagcgccgccaccataccttcaagctgaagatcggccggcgcagcgtgcgcgacgacgtggcccacgtggccgcgatcaagcgcgcgctgggcgagcgggcgcgcgtcaccgtcgacgtcaaccaggcctggaacgaggccgacgccgccaccggcatcgccatgctggaagccgccggcatcgacctgatcgagcagcccactccgcgtgagcagcgcatggcgctggcccggctggccgcgcgcttcgtggtgccgatcatggccgatgaagcggtgtgcggcccggaggacgcgatggaactggcgcgcatcggcggcgccgacgtgttcgcgctgaagatcgccaaggccggcggcatcttcggcatgctgcgcaccgccgcggtgggcgacgccgccggcatcgcgctgtacggcggcaccatgctggagggcagcgtcggcaccatcgccgcggcgcatggcttctgcacgctgccgcagctggcctggggcaccgagctgttcggaccgctgctgctcaaggacgatatcgtgcagcagcgccccgagtaccgcgacttcagcctgcacctgcctgaaggccccggcctggggctggcgctggacgaagacaagctggcgcactaccggcgcggctgaactggcaggcagcgcaccccccgcatggcacaccggtgcctgcacgcatcaagtgaggagaccaatgaagacgttattccagcggctggcaagcaccggccgcgcaggggcgctggcactggctgccggcctgtcgttcgcagcgccggccgcgcacgcggcctatcccgaccatccgatccgctggatcgtgccgttccccgcgggcggtgccatggacaatatcgcgcgcacgctgggcgaagacatgtcgcgcacgctgggccaggccatcgtggtcgagaaccggccgggcgccggcggcaatatcggcgccgaactggtggcgcgcgcgcccgccgacggctacacgctgatcatcgttgccaacggcatggccgtgaacccggcgctgtacggccggctgagctacgacccggtcaaggacttcgcgccggtgtcgctgctggcggtggtgcccaacgtgctggtggccagcaaggcgcggcgccaggaaagcaccgtcaaggacgtggtggcgcacgccaaggcggcgccgggcaagtacacctatgcctccgcgggcaatggcacctcgatccacctggcgggcgagctgttcacctcgatggccggcgtcgacatgctgcatatcccctacaagggcagcggcccggccatgacggacctgctgggcggccaggtcgactacatgttcgacagcatcacctcggccaggccgcatatcgaatcgggcaagctgacggcgatcgcggtcaccaccagcaagcgctccagcgcgctgcccaacgtgccgacggtggcggaggccggcctgccgggctatgagctgtcgccgtggttcgccgcctttgtgccggcgaagacgccgcagccggtcatcgacacgctcaaccgcgccatgctcgaggcgctgcgcaagcctgcggtgcagaagcggctggcgctgatcggcgccgagccgatcggcagttcgccggcggtgctgcgcgagcacctggcgaaggaaaccgacaagtggggtgtgctgatccgccagcggggtatccgggcggattgagcggcccggaccaacgcggttcatagggagacgcccccggaaatgctccgggggaatgtcattgccctgcccccgtctccctggcacataatgtgcgtaagatgccagccgaaaggcacactcgagcggatcacccgccggcactgaggggagacaatgagcagttcaaccgacaagttctcggccaccatgcgcgatggcctggccgatcttgcccgccgcctgcgcttcgccatggaggagggtgcgatctggctggacgagcagcgcatgatcctgatccataccgccgccctgggcgcgctgcgcaaggaactggtggacaccctgggcatggagcgcgcgcgcggcctgttcatgcgcatgggcttccattcgggcatgcgcgatgcggaggtcgcgcgcaagctgcgcgccggccacagcgacttcggccagctggagatcgggccctgcctgcataccatcgagggggtggtgcgggtcacgccggtcaaggtcgacatcgacatcgccgccggcatctacgatggcgaattcctgtgggaagactccttcgagggcgacgtccaccgccagctgttcggcatcgtcgacgagcctgcctgctggatgcagatcggctacgccaccggctacacctcggcgctgatggggcgcaccatcctgtaccgcgaggtcgagtgcatcgcctgcggccatccgcactgccgcatcatcggcaagccggtggaagcctgggaagacggcacgcaggcgctggcgctgtaccagcccgatcccgtgatcgaaaccatcatcgccttgcagagcgaggtagagcacctgcgcgcgctgcagggcaccccggccacgccggccgacctggtcggcacctcgcccggcttccgtgccgcctggggcctgctgcagcgggccgcggccagcaacgtgacggtgctgctgctgggcgagaccggcgtgggcaaggagcggttcgcgcaggcgctgcacagcgtgagcgggcgcgccgacaagcccttcattgccgtgaactgcgcggcgattcccgatgagctgatcgagtccgagctgttcggcgtggaaaagggcgccttcaccggcgccagccagtcgcgccccgggcgcttcgagcgtgcgcatggcggcacgctgttcctggacgaactgggcgagctgtcggcctcggcccagtccaagctgctgcgcgtgctgcaggaaggcgaggtcgagcgcgtgggcggcaccggcacgcgcaaggtggatgtgcggctggtggccgccaccaatgtcgacctggccgaagccgtgaagcagggcaccttccgcaaggacctgtactaccgcctcaacgtctacccggtcacgatcccgccgctgcgcgagcgcctggacgacatccggccgctggccgagcgcttcgtggcccgctacggcgcgcgccacggcaagcgcatcgtcggcatcaccgaccgcgcgctggccgagctgcgccactatgactggcccggcaatgtgcgcgaactggagaacgtgatcgagcgcggcgtgatcctggccagccagggcggccagatcaccgccgaccacctgttcctgccgggcaccgtggcaccggtggtggataccgcgccgcggctgggcgcgggcggcaccttgccagacctgcgcgaagccgcggtccatgcgctgctggaccagatgtcagagcagcagctggcgctgggcgacgtcgagaccgtgctgatggaggcggccatgcagcgcgccgacggcaacatgagccaggcggcgcggttgctcggcattacgcggccgcagctggcgtatcggtggaagatgcgcggtacgcgtgccggtaacgggcacggcaacggtaactgacgccgtttcctcgcctcaagtgccgagggtttgctcccctctcccgcttgcgggagagggagcgcgccggtggtcatcaacatcgatcgcgtcttccacgcgcctcgaattccagcttcttccccacttgatcatttgatgcagcccctccgggccgcgcatcggcccgaagttgcccgatgctgcaccgcgccagcgatttttccctgccagatcaagtcttctcacccaggttgcccacgcacgctgctgcgccgcagggcaatcccatccgcatctgctcgctgcccgcaaacgcccgcccggcgcggcttttgatcatttgatcaagacctgtgcgcagcttcatcaattcatcgatgcgtttcgcgcggacctttccgggttaacgcgcacgctcgccatcgccgattccccgtaacccttgtcccacaacgcttcgcgcttgctggcacggtcttcgcagtaaggcctgcgtccagccaacgcaacggagcgcgccatgaacaccccgtcggttcccctgttcgaagccacgccgcgctatgtgcgggtcgagggccgcacccccgaagggtttgtgcagttcgccttcagcgtggccgacccggagctcaacgtcgaactgatcatgccggaaccgatgttcgaagccttctgctgcgtcaaccgcgtgcgcttcctgcccccgctggaaaccgcgccgcagccgcaagccgacgactgacgccgcagccaccgcatcacaaagagagaagggatacaggagaccaagcgatgcaagtcgatatcaagacccagcagatccagccgctgcgccagacctacggccatgtcgcgcgccgcttcggcgacaagccggcgtcgcgctaccaggaggcgacctacgacgtgcagtctgaggtgaacttccactaccgccccacctgggacccaggcttcgagctgtatgacaagcgccgcacggcgatcgtgatgcaggactggtacgcgctgaaagacccgcgccagttctactacggcgcctacgtgaccgcgcgtgggcgccagcaggatgcaaccgaaaagagctttgccttcgtcgagaagcgcgggctgctgcaggcgctgccggccgaatggcaggaacgcctggccgttggcctgctgccgctgcgccatgtggagtggggcgccaacatgaacaacttctactgcgccgactatggctggggcacggccatcacgcaggcctgcacctattgcgcgatggaccgcctgggtatcgcccaatacctgtcgcgcatcggcatgctgctggacggcaataccggcgtggcgctggagcgggccagggtggcctggctggagagcgccgcgtggcagccgctgcgccgctttgtcgagcacacctttgtcaccggggactggttcgagaccttcgtcgcacagaacctggtgctcgacggactgctctacccgctggtctaccagcatgccgacgcggtgatcgcgcgcgcctgcggcaccgggctggcggtgctgaccgaattcatgaacgactggcgcgacgagcacgcacgctgggtcgatgccgtgatccaggccgcagcggccgagtccgacgccaaccgcgcgctgctgtcgggctgggcgcgcgccgcctgcgccgaggtggcgcaggcgctggtgccggtggccgatgcgctcaccggcgaagacggcgcgcagatggtggcgctgtgccgcgagcagttcgaagtccgcctgggcaggctcggcctggctgcctgatccgcccacgacgtaccccacggagacacgccatgtcagccaccgctgccaacgtctatatcgccctgcagaacaacgacgacacccgacccatcatcgacgccatcaccgaggccaacccgcatgcggtggtgtcgcagtttcccgccatggtcaagatcgacgcccccggccacctgaccatcgtgcgcgaactggtggccggcaagctcggccgcgactgggacctgcaggagatccacctgaacctgatctcgctgtgcggaaacatcgacgaagacgaagacgccttcacgctgcgctggaacgcctgaccgggcagcggcacacagaacatcacggagacatcatggacgcacgcaagaagctcaacctgcgcgagaagtacgcctcgatgacgcgggacctggcctgggaaacgacctacgagccgatggacaaggtcttcccgttcgacaagtacgagggcatccgcatccacgactgggacaaatgggaagacccgttccgcatgaccatggatgcctactggaagtaccagtcggagaaggagcgcaagctgtacgcgatcatcgactcgttcgtgcagaacaacggccacctgaacgtatccgacccgcgctacctgaacgcgctgcggttgttcctgaccggcgtgacgccgctggaatacgccgcccaccgcggctacgcgcacctgggccgccatttccgcggcgccggcgcgcgcgtggcggcgcagatgcagtcggtcgacgagctgcgccacgcccagacccagctgcacacgctgtcggtctacaacaagtacttccacggctttggcgaatggcgccacatgcacgaccgggtctggtacctgtcggtgcccaagtcctacttcgaggacgcgatgagcgcggggccgttcgagttcatcaccgcgatctcgttctcgttcgagtatgtgctgaccaacctgctgttcatgccgttcatgtccggcgccgcctacaacggcgacatggccacggtgaccttcggcttctccgcgcagtccgacgagtcgcgccacatgacgctgggcctggaagtggtcaagttcctgtgcgagcaggaccccggcaatatcccgatcctgcagaagtggctggacaagtggttctggcgcggcttccgactgctcacgctggtcggcatgatgatggactacatgctgcccaagcgcgtgatgtcgtgggccgaggcctgggagatgtacttcgagcaggcgggcggggccctgttcaaggatctggagcgctacggcctgcgcatgcccaagtaccacgaagtggccaccaggaccaaggaccgcatcacgcacgaggcctgggccaccttctacaactacgcgggcgccgccggcttccacacctgggtgcccaaggccgacgagatggcatggctggccgagaagtacccccagaccttcgagcgctactacaagccgcgcctggaccactggcaggagcgccagcaggccggcgagcgcttctacaacaccacgctgccgatgctgtgccagacctgccagatcccgatggtgttctcggagccggacgacccgacccagacctgctaccgcgaaagcagctaccacggcatgaagttccatttctgctcggacggctgcaaggacatcttcgacgacgagcccgccaagtacgcgcaggcctggctgccggtgcaccagatctaccagggcaactgcggcggcgccacgctggaggacgtgctcaagtggtaccggctgaacccgggcgctgacaacctcgacttcgagggctcgcaggaccagcgcaactggaacgcgtggaagggcatcgggcctgccgcggacgccgcctgaagcggcccccatcacaagacaaggagacaaccatgcccgtcgtatccatcggcgactacgccttcgaggcggccgaccgcgaggccgtgttccacggcaaccggctgctctatatcggctgggacggccacctgctgttctgcgcgccgcattgcttcccgttcccgccgtcgatgccgctgcgcgacgtggtcgacaaggtgctgcccggcgtctacggctaccaccccgactttgcccgcatcgactggggccaggtgcagtggctgcgcggcggccagccctggcagcccgacctggaccgctcgctggaagagaacggcctgggccacaaggacgtgatccgcttccgcacgccggggctggacggcatcggcggcagccgcagctgaggcgcatggtcgaacgcaccaccggaaggagaccaagatgtattcgctgaccattgaaccgatcgggcagaccatccccatcgctcccgggcagaccgtgctggacgcctgcctgcgcaacggcgtgtggctgccccatgcctgctgccacgggctgtgcgccacctgcaaggtgcaggtggtggacggcgaggtcgagcagggcgaggcctccagcttcgcgctgatggatttcgagcgcgacaacggccagtgcctggcctgctgcgcgaccgcgcagtcggacctggtgatcgaggccgacatcgaggaagacgccgatgcgctgggcctgccgctggccgactatcgcgccgaagttgtcgagacgcgcgccctgacgcccaccatcctgggcatctggctgcgtgtgaaggatggtggacgcacgaccttccaggccggtcagtacgtcaacctgaacgtgccgggctgcgaccagccgcgtgcgttctcgctggccaacgcgccgggcgacgagctggtcgagctgcacgtgcggcgcgtgccggacgggcaggccaccggctacctgcacgaccagctggcggtcggcgacgaattgtcgttctcagcgccctatggccgcttcttcgtgcgcaagtcggcgcaggtgccgatgctgttcctcgcgggcggctccggcctgtccagcccgcgcgcgatgatcctggacctgctggccgccggcgagaccctgccgatgacgctggtgcagggcgcgcgcaaccgcggcgagctgtactacgacgccgagttccaggcactggcgcaggcccaccccaacttccgctacgtgcccgcgctgtcggacgaacccgccgacagcggctggagcggcgcgcgcggctacgtgcatgacgtgctgcaccagctctacgcgcaggacggcaatgccgacttccgcggccacaaggcctacctgtgcgggccgccgccgatgatcgaggcttgcatccgcacgctgatgcagggccggctgttcgaggcggatatccacaccgagaagttcctgtccgcggccgatgcgcagaacagcgcgcgcagtccgctgttcaagatctgaggaggccggccatgcataccgtcgagatcgccggcagcgggctgcgctacccctgcgcggcggagcagaacctgctgcgggccatggaagtgctgggccagcgcggcatccccgccggctgccgcggcggcggctgcggcgtgtgcaaggtccgcatcgaagccggcgactttcacgccggcaagatgagccgcgcctgcctgtccgaagcggagcagcgcgacggactggtgctggcctgcaagacctacccggacagcgatatccgcctgcggccggtggccctgctgcagcgctgcctggaaaagcagcggtggcgcgaacagggccggtagcacgcaaacgaagcacaagcaaggaaggtggcacccacacaacgccaccccaccacaccaggagacccatcatggcattgacaggcgtattgcgaccggggcatgtagccctgcgcgtgctggagctggaaccggcgctgaaacactacaccgaggtactcggcttgatcgaaaccgcgcgcgatgcgcagggccgggtgttcctgaaggcatgggacgagcacgaccaccacagcgtggtgctgcgcgaggccgacagtccgggcatggactacatgggttttcgcgtcgacagcggccacacgctggagcggctggcgcaggaggtggagcaatccggcctggccagcgattgcaagtggatcgccgcgggcgagcacccgcataccggcgtgcgctttcgcttcaccatcccgacagggcatgcgatcgaactctttgccgacaaggacaagcttggctgcaagaccggcgacctcaatcccgacccctggccggacgacctgcgcggcatggcgcccagccgcttcgaccactgcctgctgtatggcgacgatgtcgacggcaccgtcaagttgttccgcgacgtgctgggcttttctctggccgagcaggtcgtggccggggccgacggcgagatgctgatcggtgccttcctgacctgctcgaacaaggcgcacgacattgcctttatccgccacccggagaagaaccgcttccaccatgcctcgttcctgcttgataactggagcgaagtgttgaaggcggccgacatcatctccaagaaggacgtgtcgctcgacatcggcccgacccgtcacggcattacgcgtggcgcgacgatctacttcttcgatccctcgggcaaccgcaacgaggtcttctccggcggctatatccactacccggacaagcccaccatcacctggaccgataacgagctggggcgcgcgatcttctaccacgacaggaagctgaacgaagcgttcttgaatgtgctgacctgagcgcgaacgctcgcctcccgctcgtttgctccctctcccgcttgcgggagagggagcacccaatcgatgagcggaggattgccgtgcacgaatgcttcaataccagagaaacaacatgaaagacttcaagaacttcatcaacggcgagtgggtcggcaccgcgcggaccttcgagaaccgcaatccggccgacaacagcctgatcggccacgtgcacgaggccggacaggccgaggtcgacgccgcggtgcgggccgcgcgcagcgcgctgcagggaccgtggggccgcatgacggtggcgcagcgggtcgagctgctgcacgcggtggccgacggcatcaaccgccgcttcgacgaattcgtgcaggccgagattgccgataccggcaagcccttcgggctggccagtcatatcgacatcccgcgcggcgcggccaacttcaaggtctttgccgacctgatccgcaacgtgccgaccgaaagctttgccatggacacgcccgacggcggcaaggccatcaactacgcggtgcgcagcccgcgcggcgtgatcggcgtggtgtgcccgtggaacctgccgctgctgctgatgacatggaaggtcgggccggcgctggcctgcggcaacaccgtggtggtcaagccctcggaggagacccccgccaccgcgacgctgctgggcgaggtgatgaacgaggccggcgtgccgcccggcgtctacaacgtggtgcacggctttggcccggattcggccggcgcgttcctgaccgcgcacccgcaggtcaacggcatcaccttcaccggcgagacccgcaccggcgaggccatcatgaaggcagcggccaacggcgtgcggccggtgtcgttcgagctgggcggcaagaacgcgggcatcgtgttcgccgatgcggatttcgacaaggccgtggccggcatcacgcgctcggcgttcgagaacagcggccaggtgtgcctgggcaccgagcgcgtctacgtgcagcggccgatcttcgagcgctttgtcgccgcgctgaaggcgaaggccgagggcctgaagctgggtcggcccaccgagcccggcgtgaacatgggcccgctggtgtcgcacgagcaccgcgacaaggtgctgtcctactaccgcaaggccgccggggccggcgccaccgtggtcaccggcggcggcgtgccgcagatgccgggggcgctggccgaaggcgcctgggtgcagcccaccatctggaccggcctgccggaaagcgccgccgtgatccgcgaggagatcttcgggccgtgctgccatatcgccccgttcgacaccgaagaggaagtcatcgcgctggccaacgacaccccgtacggcctggccgccacggtctggaccggcgacctcggcaccgcgcaccgcatgggcagcgcgctggacgttggcatctgctggatcaatgcctggttcctgcgcgacctgcgcaccgcctttggcggcgccaggcagtccggcatcggccgcgagggcggtgtccattcgctcgagttctacaccgagctgcgcaacgtctgcgtccgcctgtgaggtcccgtcatgcataacgaacttatccttgagatcggcgccggcctgcaccatgcgctggcctcccgtcgcccggtggcgccgctgaccgaatcgtggccggagctgagcatcgacgatgcctaccgcatccagctggcgatggtgcagcatcggctcgacgccggcgagcgcgtggtcggcaagaagatcggtgtgaccagccgcgtggtgatggacatgctcgacgtgcgccagcccgactttggccacctgctgtccggcatggtctaccccgacggcgcggcgattcccgccgacaccctgatcgcgcccaaggccgaaggcgagattgccttcgtgctgaaggaagacctggaggggccgggcgtgaccaatgccgacgtgctgcgcgccaccgcctatgtgctgccttgcttcgagatcgtcgactcgcgcatccgcgactggaagatccgcatccaggacaccgtggctgacaacgcatcgtcaggcgtgttcgtgctgggcgatgccgcggtggacccgcgcagcgtggacctgggcacggtcggcatgacgctggagaaaaacggcgagatcgtcgcgaccggcgccggcgcggccgcgctcgggcatcccgtcaatgcggtggcgtggctggccaatacgcttggccggctgggcattggcctgaagcggggcgaggtgatcctgtccggctctcttgccgcgatggtgcccgtaaccgccggcgaccagctgcgcatcagcctgggcggcatcggctcggccggcgtgcgcttcgtctgaacccgacccatttttcaattcagcgcaggacatgccatgaatctgacacacgacaccattgcccggctcgccgagcacctggagaacgccgagctgcagcgcgaggcggtgcgcaagatcaccgacgaatacccggacatggactgggacgacgcctacgccatccaggacgccatccgcgcgcgcaaggaggcgcgcggcacccgcatcgccgggctcaagatgggcctgacttcgttcgccaagatgcgccagatgggcgtgagcgacccggtgtacggcttcctcaccgactatggcgcctgcatggacggcgccgccatcgataccggcacgctgatccatcccaaggtggaagccgagatcgccttcgtgctgaaggcgccgctcaaggggcctggctgccatatcggcgacgtgctggccgcgacggacttcgtggtgccggcggtggaggtgatcgactcgcgctacgagaacttccgcttcgacctgaagagcgtgattgccgacaacacctcgtcggcgcgcttcgtcgtgggcggcacgcaccgcggcgccgaggggctggacctgaagaacctgggcgtggtgctggagaagaacggcgaggtggtggccaccgcggccggcgcggcggtgctcgggcatccggccaacagcgtcgccatgctggccaatatgctgggggcgcgcgggcgcgagctgccggcgggcaccttcatcatgaccggcggcgtgaccgaggccatcgcggtggcggccggcgacaacatcaccgttcgctaccagcacctgggcacggtatcgatgcgcttcacctgaaccgcgtagcaaggagacacaccatgccaatcatgcaggtcttcctgatcgaaggccgtaccgacgaacagaaggcgcgcctgatccgcgcgctcaccgatgccgcggtcgaagcggtgggcgcaccggtggaaaccgtgcgcgtgatgatcaccgaggtgccgaaggcgcagttcggcatcggcggcaagaccgccacggaactgggccgctgacgcccacgcgataaggacaacgacatggacatgaaagcaagcggccaccacaaggtggccatcatcggctccggcaatatcggcaccgacctgatgatcaaggtaatgcgccacggccggagcctggagatgggcgccatggtgggcatcgatgccgcgtcggacgggctggcccgcgccgcgcgcctgggcgtgccgaccacggccgagggcatcgacgggctggtcggcatgccgggcttcggcgatatccgcatcgccttcgatgccacctcggccggtgctcatgcgcatcacaaccgcgtgctgcagcagcacggcgtgcgcgtgatcgacctgacgccggcgtcgatcggcccgtacgtggtgcccgtggtcaacctggaccagcacctggatgcccccaacatcaatatggtcacctgcggcggccaggccaccatccccatggtggcggcggtgtcgcgcgtggccagagtgcactacgccgagatcgtggcgtcgatctcgagcaggtcggccgggccgggcacgcgcgccaatatcgacgagttcaccgagaccaccagccaggcgctgtgctcggtgggcggcgccgcgcgcggcaaggccatcatcgtgctcaacccggcggaaccgccgctgatgatgcgcgacacggtcttcacgttgtcggaggacggcgatgaagcggaaattgcggcgagcgtcgaagcgatggcgcaggcagtgcagggctacgtaccgggttaccggctcaagcagcgcgtgcagttcgagcgtatcgccgcgtcggcgccattgaatatccccggactgggaccgatgagcgggctcaagacctcgatcttcctggaagtggagggcgccgcccattacctgccggcctatgccggcaacctcgacatcatgaccagcgccgcactggcctgcgccgagcgcctggccgagacccggctgtccgcatgagccgcagggagacaaagatgaccgcacaacccaccaagaagctctacatctcggacgtgacgctgcgcgacggcagccacgccatccgccaccagtacagcctggagcacgtgcgccgcatcgcggccgcgctcgacgccgcgcgcgtggattcgatcgaggtcgcgcacggcgacgggctgtcgggctccagcttcaactacggctttggcgcccataccgacctggaatggatcgccgccgtggccgagaccgtgcgccatgcccgcgtggccacgctgctgctgccgggcgtgggcaccttgcacgacctgcgcgccgcctatgatgccggcgcgcgcgtggtgcgcgtggccacgcactgcaccgaagccgatgtctcgcgccagcacatcgaatatgcgcgcgaactcggcatggacaccgtcggcttcctgatgatgagccacatgaccacgcccgcggcgctggcgcagcaggcgaagctgatggaaagctacggcgcccagtgcgtgtatgtggtcgattccggcggcgcgctgggcatgcaggacgtgcgcgagcgcttccgcgccttcaaggacgtgctcaggccggaaacccagaccggcatgcacgcccatcacaacctgagcctgggcgtggccaattccatcgtcgccgtggaagagggctgcgaccgcgtcgacgccagcctggccggcatgggtgccggcgccggcaacgccccgctggaagtctttatcgccgccgccgaacgcctgggctggcagcacggctgcgacctctacacgctgatggatgccgccgacgacatcgtgcgcccgctgcaggaccgcccggtgcgcgtcgaccgcgagaccctggcgctgggctacgccggggtctattcaagcttcctgcgccatgccgaggccgccgcggcgcgctacggcctgggcacggtcgacatcctcgtcgagctgggccggcggcgcatggtgggcgggcaggaagacatgatcgtggatgtggcgctggatttgctggcgcggcgcagtgctcaggcggggcaggcagtgccgtcggcggcggtggcctgaccgtcggcaggcgcggtcagggcgacgccggcgcggcgcgcgccgcaacgatcgccagcatcgggccgctcacgctcaatggccagggccggctgcgcggcaacctgcgcgtcagtcggtccccgccgtggtcgcgtcgccgcttgccatgcggtggaagacaatatcgtcgaccagcggttccagcggtgccgcaatgcggtcgatggtgccttcccggttgtagaggaaggtgagggccaggttgtcaggatggatttcggcgggtttttcggcggtggtgaacacatcgtaatgacgatgggcgagctggccggacatgccgcgccagcgccagacttgtcgacccgcagctgcgcgagcatttcctggcgccgggcgcgcatgcggccgagccagtcgatgggcgcatggccgcgcaactggtccagggccgcataggtcagcagcgcggtcaccgcgctgggtgcccggttggtcagcaccgcaatgccgatacgcctggatggcatcagcgtcatcagcgccgcccagcccagccagctgccgctgtgcgagaccgtgcgctcgccgcggtattgctcgaccgtgaggccaaggccgtaatgctgatcgccgacctccgggaactccgacatgccgatatgcacgcctggcgtcatcatgtcgcgcacgatcgccggcgatagcagggcacgcccgccaaccttgccttcatccagcaggcagcgcatccatttcgccaggtcctccaccgaggtggcgaggccaccggccggcttcacaatggaggaccagttcgcacgcaagcactcgcttgcaaccatcgtatgcgggtgcgcgtggtcgggagcggcggccagggcctcggcgcagaaaccgaagcgtgagaaacccagcggccgcagcaggcgctcctcggtgaagtcctcccagcgctggccgctgaggcgctcggccacatggccggcgatcacgtagccaaggttctggtactgccagcgttcgcgcaggtcacggctgggcgccaggtggcgcagccgtgccagcagttcgccggtgtcgaggtcgcccggggtatggagccagtcgtggcgcggcatgccgctgtggtggcagagcaggtcgcgcaccgtgatgcgctcggtggtgacggcatcgtgcagccggaatcccgggatcaggtcgcgtacgggcgtggcccagtccagcctgcgctcgtccaccagcaggcccaggccggccgcggtgaaggacttggtgatcgagcacagcatgaactgcgtggccgttgtcaccggtgctgatccggcgctgtcgcggacgccgtagcccagcatcaggacgggctcgccgtcgcggatcacggccagcgcaagcccggggatcttccagtccgccatcgactcttcgaccagtgcatcgaatccgttcagcatggggcattcctgggggcatgggctccgtatgctgccatgtcctggcgacgcagtcatcgccgggtcgaagtgaccgtgccttgcttgcaacatccccagcgttgacagccattcctcctgctggccacgccatgcccctctctcgtagggatcagttcggcgcgtcgcgtcgttagccagcgcaacaggagcacggaccggggtgccgatacgctggccacgcagcggcgcgcggcgcacaggcgggccgcggcatagcgccacgccgggccggcctggctgcaaggtggccccggggcgggtaaactggccggtcccagcctccttgccaccgccatgaccgccctgcctatctccttcgacgacgtcgccgccgcacacgaacgcatccgcgcggcggctcaccgcaccccggtgctgacctccgccaccgcgaacgtggccaccggcgcgcagctgttcttcaaggccgagaacttccagcgcatcggcgccttcaagttccgcggcgcctacaacgccatcgcccagttcacgccgcagcagaaggcgggcggcgtgctggcgttctcttccggcaaccatgcgcaggcgatcgcgctgtcggcccggttgctgggcgtgcaggcggtgatcgtgatgccgcaggacgcccccgcgatcaagatcgaagccacgcgcggctatggcgccgaagtggtgctgtacgaccgctaccaggacgatcgcgaagcgctgggccggcgcatcgccgccgagcgcggcatgacgctgatcccgccgtatgaccatccgcacgtgatggcggggcagggcacggcggccaaggagctgttcgaggaaaccgggccgctggacatgctggtggtgtgcctcggcggtggcgggctgctgtcgggctgcgcggtggcggcccgggcgatgtcgcccggctgtgccgtgtacggcgtcgaacccgaggccggcaacgatggccagcgcagcctgcgcagcggcgagatcgtccgcatcgacaccccgcgcaccattgccgacggcgcgcagacgccgttcctgggcaaccacacctttgccgtgatccgcgagctggtgacggacatcgtcacggtgtcggatgcggaactggtcgacaccatgaagttcttcgccgggcgcatgaagatcgtggctgagcccaccggctgcctggccgccgccgcggtgctgcacggcaagctggatgtgaagggcaagcgcgtggggatcatcatctcgggcggtaatgtcgacctgggcgccttcggcagcttcctgctgggctgagtcgggcggcagggaatcctggactggccctggccgtctaacctgcaatccgcgacgacaaagccaggggcggccatgacggacaagcgccactatgacgtgctggacaccggcgccggcaagccggtcaagctgtggacgcgcggcgtcccggtggaaggcgctgcccgcgagcaactgctgaacacggcgcggatgccgttcatcttccgccatgttgcggtgatgccggatgtacatctgggcaagggctcgaccatcggctcggtgatcccgaccgtgggcgcggtgattcccgccgcggtgggcgtggatatcggctgcggcatgatggccgtgaagacctcgctcaccgccgctgacctgcccgacaacctcgggccgctgcgcagcgcgatcgagcacgccgttcctcacggtcgcaccgcgcagggcgggcggcgcgaccagggggcctggggctcggcgccggcgcccgttgacgcggcatgggccgaaatggcgccgggctttcgccgcatcaccgacaagtatccgcacctggcgcgcaccaaccatcgcaatcacctgggcacgctcggcaccggcaaccactttatcgaggtgtgcctggacgaggcccagtcagtctggttcatgctgcacagcggctcgcgcggcgtcggcaatgccatcggcacgaccttcatttcgctggcgcagcaggacatgcgcaagcacctcgccaacctgccggaccgcgacctggcctacctggtcgaaggctccacgcactacgaggactacatcttcgccgtgtcatgggcccaggcctacgcgcgccgcaaccgcgagctgatgatggaggcggtgctggccgctgcgcagcgcgtgctgcgcaagcccttccaggcgcagctggaggcggtcaactgccaccacaactacgtgcagaaggagcatcacttcggcgccgacgtgctggtaacgcgcaagggcgcggtcagtgcgcgcgtgggcgagctgggcatcatcccgggatcgatgggcgcgcgctcgttcatcgtgcgcggcaagggcaacccggaatcgttctgctcatgcagccacggcgcggggcgcaccatgagccgcagcgaggccaagcgccgtttcaccgtggccgaccaggtgcatgcgaccgagggggtcgaatgccgcaaggacgccgcggtgatcgacgagatcccgatggcgtacaaggacatcgacgcggtgatggcggcgcaggctgacctggtggagatcgtgcacacgttgcggcaggtggtgtgcgtgaaaggctgaacggcggttgccctcgccgccgagcggcctctggcaggggcatccggcactgaatccgccctgcgcagaggcattgcagccggggccactctactggaagatcagcgtgctcaccggttgtccgtttgcaccgaagaaagtgaacttggacgagacaaagctgatgtttccgctggtgtcgatccggaacgtggtttcctcctctccgacccgggcattgttgttatcgaactctgtgttgaggaatgtcacgaggagcgtggtcccagaatcgggtgccacggaaaaggactgggtgagcgagcccagtttcgcggcttgcgtgttgtccgagaaaatcgtggcggttgccagcgggccggagtcgccagcctttacagttgccgggaatgtgtagtcggcgaaagccgcataaccatccgccccctggtcgatagcgaccacggcaaaggttgccgagtttctgaagataaacctggcgcccgaaaacggctccgagtttccgttcgtgatgactgtgcctgtgacggtttcggtggtcttcaggacaacggcgctgttcagcgtggcggaatcggctggcgccgcgttgagcgttcctgagcctgaaactggcttattctcgactgaaccggagatggaaaaattcgcggttatgccgttggccgccagcgccgccatggcggtggtgagcggcactgtcagagtttgcgccggcggactcgctgcctcgctgctgccgccgtcatctccgccgccgccacagctgccaagtaagaacgaaaatgcgaacaaaaataagaatctcttgggcatcgccggctcctgacggaagtgccccggattcgaaatctttgtaaggcgcgccgcggcaggaaaggaaggctctggcgtaaatcgcaggcttctcgttcctgccgatcctcaaaatgccaggctgccgggaaggcttggcttacgatggcgtcgcgaaaattctcgcgcaacaaatatgccatccatgccatcgcgtttgattcttctacgttttttcaagcgtgtatattcggcaaacatgcgaaacaacaagatcggttccgtttttgatacgcgccgtcatcggcgccccatcgctgcaggtgaaccttgatgatgtcggcgacggtcggattctgatccggcctgatggccagttggcatgcgcccccccggtgccaccggattgtcgcggccatcccgcaggcacgaacgcgctctcacggggctggcttgcgcccgcgtggcaacgatgtactacgggaagtcgggggatccgtctgctgtggcctggccggtgccccagccgggtcagtcgacgagcagatttatcttcgtcgtgaatttctgccagcgatcgatgtcggcgctcaccagcttctggaattcagcgggcgtgcttgtcgtcgtggcaaagccgagctgcgtcagcgatgccttgacctcgggcctggcgatggccctggcgatttccgtgttgagcctttgcacgatctcgggcggcgtatttgcgggggcgaggatgccgaaccactggtcgacgtcatagccggccacgccaagctcgctcacggtgggtacgtcgggcaggaacggcgagcgtgccttcgacgtgacggccagcgcgcgcagcttgttgcttttcaggtaggggatggtgttggtcagcgtgttgacgctgacatcggcctggttgccgagcacgtcggcgatggcgggggcgcaacccttgtacggcacgtgcagcatgtccatccttgccgagaccttgagcagttcgccggccagatgctgcggggtgccgttgccgcacgacgcatagctggggggtgatgggctcttgcccgccgccagcaggtcgctgaaggtgcggagtttcgagtgcgatggcacggcgatcaccgatggcaccgaagcgaaggtgatgacggcgctgaaatcggacttgggattgaactgcagcttcttgaagacgctcgggttgatggcaaagctgctgttgacaatgagcagcgtatagccgtcggcaggactcttggcgacgaactcggcgccaatattgccgctggcgccgggccggttgtcgatcaccaccggctgccccagcgacttgctgatgtcggccccgatcaggcgcgcgagagaatcggtcccccctccggccgggaacgtcaccaccatgcggatcggcttttgcgggaaggtactggcgatattggcttcggcgcgcccgggcagggtgcccaggctgcctgcgacaaacaggagcgatgccagactgctgacgacggataggggtctcattgatatgcctcgtcggttagggtgaaggaagcgggaaagccggtcaatcggggtctatacgcaccgcctggcagcactcgccgccggcgcgcaccagtgctgcagccgcctctagcgcttcagcggagtccgagtggatacggtagagcggttgccctggcgccacctttgcaccgatcgcgcacagcatgtcgaccccggcaccgccatcgcgcggcgcgccggcggcgcgcgccacgccggaaatctgcaggccatcgacgcccgccacccggccccgcgtggtggcgggaacgaccagcgtatgcgtacccggcgccactggatcgcagcggacgccctgcgcggcggcgatgcgatcgaacgcggccctggccttgccttcatgcagcagcgccgccgcaatttgcatgccgtgttcgggggagtccacgcggggatcgaatgcgatgatttcgccggcaaagcgcagggccttgtcgcgcaggtcggcgggcgcatcgggagcgttgtcgagcacgagtcggacgtcgcgcacttccagtgcggggccgatgccgcggccgatcgggccgctgccgtccgtgaccagtgcgcgtacgtgcaggcccagtcccttgccgacgtgttcgaacagcgcgcccagcgcctcggcgtcggcgcgtgttgccagcttggtttgcggcccgtagggcaggtcgacaatgacgtgggtggcgccggcggtgtactttttcgacaggatcgacgccaccgaccagcgccgcgaatcgagccgcagcggtcgcgtgatggcgttcatcacatcgtcgaccacggaatggttcagccgtccgttccaggcgatgcaggcgcgtgcctgggccacgcatcggcgcacgtcttcatgcgccaggtcgacccgtgcgatggtctccatggcatcggcggtgccggcggcagaggtgatcgcgcgtgacgatgtcttgggcatcgccagcccgtaggccgcgacgatcggcaccacgatcagcgtgatgcggctgccgggaacgccgcccatcgaatgcttgtcgacgactaccggttcgtcccagtcgatgcggggtgtgaaggcggtacgcgcgcgcgccagagccaccacttcctcgtccgtgagcgtgcgggttgcggcaaccaggaactcggtcagctcggcctcggtgtagcgcccggcgatggcgtcctgcagcacggcaacgtaggccgcttcgtcgagcggctcgccgcgcagcttggccataaggttggtgcggctggccggccgttcggcggcggatgtcctggtgccggtgcgcaaggcttcgacaaagcgtgccgtgcctgcttccagcgtgctgtggttcgacaccgtgatacacgggacgtgtggcggcaccggagctcccgcgcgtgccacgcggctggcaacctggtcgcccgattcccgcccgcgtgcggcaatgcgccgggcaagcacgtcatgcggtgccgttaccaggaccaccacgaaacggggcaagcgcgccgcgagttccgcgatgacgccgcgcgagccattggccacgacgttgcggccgcgttcgagctcgcacatcagggacttgggcaatccgtagcgcaggtcgtgcgcgtcccaggtcaccaggaactctccgcttcgctggcgccgcgcgaactcggcctccgtgacaccttcgtgctcttcgccagcagacccgtcgggacgcgtgatgacgcgccgcgcaaaaacgtagtcgccgtcgagcgcggcacgtgcaccgtcgatcagggagtccttgccagcgccactgggccccacaacaaagaagaatgtgccggtcgccttcatgagtattaccttagatgtcgaagttatgtggctatgctagcaccggccaggggggtgtcaagataagttcgatgtctaaggtaatgcaaacaacgggccagcgcccgcaaatccagtgtgtacgcgggattcgcggacttgtaggggaaaacacggggatacgggtgcgcagtgacggtgcctcatgcatgggttgcgggcatcgtgcactgatggagtgaacgctacatggagaggcatggccgatgaagcggtgatgtcggcgtgcgagcgccggaggcgctatcatgtgcgctgtcgctggcaccgggccgtccgctgccgcatgcatacgctctactttccctcacgactatggccacaaagaaaccggatgctccggtcccgatcacgcctgcggatgaagccgatgaagaacggcttgcccacctggtgaaggatgccgcccgggcctacatccgggcgctgcagctgcggctggcggaacattcggtttcgtatggccactggaccatcctgcgtatcctgtggcgccatgacggcgtgtcgcagcgagagctgagcgaacgcgccggggtgaccgagccgacgacgtttgcggcagtcaaggcgctggaggcgctgggctacgtggaacgcacgcatcttcctggcaacaggaagaaggtgcatgtgttcctgagcaagaccggacgcgggctgcgccgcaagcttgaaccgctggcgaccgaggtgaatgaactcagcgtggcagggctgagcgaagaagacgtgctgaccacgcgccgcgtgctgatcacgattgcgaagcggctggtcgccgacgaagccgcgtcggcggaacatggccggcgggtcccgtccacccaggaggtagggcgcctgctctcggacctgtagacgacccgcaacggaaaagaccctcgccgggcgagacggcaagggtgaatgccttgggtagaaggcgtgaatcggtcagggggcctgagccccgcgggtgtcaggcttcgtcgagcccgatgtccacggcaggggccgactgggtgatcttgctcgtggagatgtagtccacgcccgtttccgccacggcccggatcgtttccaggcggatgccgcctgacgcctcgactttggtccggccattgacgatctgcacggcttccttcatgtcgggcaccgacatgttgtccagcatgatcacgtcgacaccggttgccagtgcttcgtgcacctgttccagccggtcgcattccacttccagcttggtcagcacgggcagcttgcggcgcacgcgtgccacggcggcagcgatgctgccgcacacggcgatgtggttgtccttgatcatcacgccgttgtccaggctcagccggtggttcaggccgccgccgcaggtcaccgcatgcttttccagcgcgcgcaggcccggcgtggtcttgcggctgtcgatcaggcgcgccttggtatgggcaatggcctgggcataggttgccgtatggttggcgatgccgcacagacgctgcatgatgttcagcgcggtgcgctcggccgtcaggacgctgcgtgcattgccgctcacgttaagcagcaccgcgcctttttcaaccttgtcgccgtcggcgacgcgcacatcgaccgacagcgtcggatcgtagcgcgcgaagatgcgtgccgccacgtcgatgccggcgataagcatcggctcgcgggcgttcatgcagaaggtgccggtctctcccggttcaatcatggtctggacggtcaagtcgcagatgccgatgtcttcggtcagccagaggtcgatcagcttgtcggtggcgaaaatgtcgtacatgaagggctcctgaacggtggttgcggtacctcataaatcttagagatcgaagtacatggcgcaatactagccctttcaggcgccatgtcaagtaatattcgagatctaagataaagcgcaaacctaccgcgcaaactgccccagcaccgtcccgaccgcctccagccccgccccgatcatatgctgcatgtaggtgcccatctgcggcattaccagcatcagcaccagcaggccgccggacagcgtgaccgggaagccgaccgcaaagatcgacagttgcggcgaggcgcggttgaggatgcccatcgccaggttcagcgtcagcagcgccgcgatcatcggcagcgccagcagcagcccggacgagaacaccatgccgccggcgcgggccacggccatggcgccgccggcggacagcggcgtgccgccgatgggcaggccgctgaagctgtcgaccagcgcgcccagcatcagcaggtggccgtccagcgccaggaacagcagcatcgcgatcaggttcaggaagcgcgacagcaccatggtctggccgccggcggcgcggtcgaagaacgaggcaaaggacaggcccatctgcaggccgatgatttcgccggcctgctgcacggtggcaaagaccagccgcatggcaaagcccgtggccaggccgatgccgacttcgttgaggatgatcatcagcccgccgaaggagtacaccggcaccaccggcagctgcgcgatggtgggcgacaccaccaccgcgaccatcgcggacagcgcgatcttggcgcggcgcgggatggtggactcaccgaacagcggcgcggtgccgatcagggccaggatgcggaagaaaggccacaggaacgccgcgagccagctgtagagctgggctgaggtgaattcgaccacggcggggagtcagggggcgggagggcggcggcgggggctggccagcgtcagtgcgccagcgcgggaatgctctggaacacctcgcgcatgtagtcgaccatggaattgatcatccacggccccgccagcaccatggtggcgaacagcgcgatcagcttggggatgaagctcagcgtcatctcgttgatctgcgtcgcggcctggaacaggctcaccaccaggccggcggccagcgccaccagcagcagcggggcggccagcagcagggtcatcttcatcgcctgggtggcgatggtcattacggtctcgggtgtcatggctcggactctgcggtgggtggcgggcgttggggccgtgtcagttcatgaagctctgcgccagcgaaccgagcagcagctgccagccgtcgaccagcacgaacagcatcagcttgaacggcagcgagatggtggccggcggcaccatcatcatccccatcgccatcagcacgctggcgacgaccaggtcgatgatcaggaacgggatgaagatggtgaagccgatctggaacgcggtcttcaactcgctggtgacgaaggccggcaccaggatgctgagcggcacttcctcggggccctgcatctcaggcgccttggccatctgcgcgaacatggccaggtctttctcgcgggtctggcgcagcatgaaggccttgagcggctccgcggccttggccgcggcggcttccaggctgatcttgttttccgacagcggcttgtaggcgtcgttgtagacacggtcgaacaccggtgccatcacgaagaaggtcaggaacagcgacaggcccaccagcacctggttgggcggcgaggtggcggtgcccagtgcgctgcgcagcaggcccagcacgatgatgatgcgggtgaagccggtcatcagcagcatcgccgcaggcaggaacgacagcgaggtcagcagcaccagcgtctgtaccggcagcgaccagatctggccgccgcccggggcgggcttgctgatgacgccgggcagtgcctgggcccaggccggcgcgggcgccagcgcggcaatggccagcatcagcgcgagcagggacagcagcgggcccggcagcgggcgccgcagcgcggcacgcggggaattcatgacttgaagtgattttgcatcgaacgcagcagcttttcggcaaaggtgccgccacccggctgttgcgaagggcctgcaccgccggtggcggcgaggggattggctgcggtggtgcccgcaggcagggtatgcagtggccggatttcgccggggctcacgcccagcaccagccaggtatcgcccacttccaccagcaccaggcgctggcgtgcgccgagcatggtgctgccgaccaccttcatcgcgccgccggtggcctgacggaccaggccggcacgccgggccacccaggccatgcccaggatcagcgcgacgatggcgaacagccccagcccggcctgcgccaggctggccgcgccgctgatggcgggcgcgtgcgtgccgtcggcggccatggcggcccccggcagcgccgcaagcacggccaggctggcgcgcgtgtgcatgatcatttgttcagcttccggatgcgttcggacggcgtgatgatgtccgtcaggcggatgccgaacttgtcgttcaccaccactacctcgccctgcgcgatcaggtagccgttgaccagcacgtccatcggttcgccggccaggccgtccagctccaccaccgagccctgcgccagctgcagcaggttcttgatgggcaccttggtgcggcccagttccacggtcagctgcaccgggatatcgagaatcatctcgatatcgttgcggaagccgctcggcgcttccttcgccagcggctggaacacggtggcggcggccggagtggccgcgggttgggccgccggtgcggcagctgcggggatcccggcggatgtggcgctggtctgctcggccagcgcgctggcccagtcgtccatcggatcgacgggcttgtcctcgatgccgtcactcataatcgctgtcctcggtgtccaggtgggaatcgccgtcctggtgattgatcattcgttctacccgcagcgcgtactggccgttcatcgtgccgaagccgcattgcatgacgggcacgccgtccaccttgccgaacaccttctccggcagctcgatcggcagcacgtcgccggcgcgcatcgccagcacttcggccacggtgctctgcaggtgcgcgaactcggccaccagctccacctcggccgcgcgcagctgcgtggacagttgcgtgacccagcccttgtcgacttccttctcgtcctgcagcggattcatcagcaggtccttgagcggctcgatcatcgcgtacggcaggcacacgtggagctgcccgccgacggcgcccagttcgatatggaaggcggtggtcaccacggcctcgttgtgggtggcgacgttggcaaacttggggtgcatctccgagcggatgtactcggtctcgatcgggtgcacggtgcgccaggcgttgccgtagctggccagcgtcagctccagcatgcgctggatgatgcgctgctcggtctgggtgaagtcgcggccttccacgcgggtgtggaagcggccgtcgccgccgaacaggttgtccaccaccagaaacaccaggttcgggtcgtagacgaacagcgccgtgccgcgcagcggcttcaggtggaccaggttcaggttggtcggcatcggcaggttgcgcgcgaagtcgccgaatttctcgatcctgatgctgcccacggtgatgtccgcgccgcggcggatgaaattgaacagcgccgtgcgcatcgagcgcgcaaagcgctcgttgatgatttccagcgtgtgcaggcggccgcggatgatgcgctcctgcgtggccaggttgtaggggcgcacaccgccctcgtcgagcgcaggctcgctggccttgggcgtatcggcttcgccggatacgcccttgagcagctcgtcgacctcgtcttgcgagaggaacttgtcgtaggccatctagtgtcctgccccttgtgcggcgttatggatgaatccggtgcggccctggcttgcgcttactgcaccacgaaagaggtgaagagcacgtccagcacccgctgcgccggcaggccgctggcaaacggcttgctgatggtgtcgcggatgtcgtcggccagcttgcgcttgccttcgacggtggccaggtcggccggctgcctggccgacagcagcagcaggatgcggctgcgtgcctcgggcaggtactgggccaggcgagcctgggtctcggcatcggccaccttcagtgacaggccggtgtgcaggaagcggtcgccgtcgtcgctgcgcaggttgacggtgaacgcgtccagcggcacgaagatcggcggcggcacgaccggggcggcaggcgcggcgggcgccgccggctggcggttgctcagcacgctgcccagcacgaagcctccggcgcccagtgccaccaccagcacgccggcgccgatcagcagcagccggccgcgcttgcctgtgttgccagtccggggaggggaagccgtgttcgccatgagaagcctgtatcggaatgcctgccattcttccggaatcgcaggccagcaaagggccgaaaaaaagggggaaaccctttcagcttggccatttgagcggaaagggagcaggcacggctacgcgagcgggcgccgtttgttgcgcgcctgcaggctggttaacgcttgatgtcgtgtgaacttgagtgccggtgcaagctgccgcgattcctggccgggccgccgggcaggggcgcggtagcgccgccatgcattccctactacgccagtcgggtagtgattcatgtgggtttgcacgtcatccaatctccaatacgttgatttgcatgatgttttttgtcttcactcttatataagatataagacatttgaccggggagcggcttcagactacaatcgcgacgtaacgagattttctaaacctaattactcagcaggttcccatgcttgaaaactatcgcgcacatgtggccgagcgcgccgcgcttggcatcccccctctgcccctgaccgccaagcagacggccgagctggtcgaactgctgaagaacccgcccgccggtgaagagcagaccctggtggagctgatcacctaccgcgtgccggccggcgtggatgacgccgccaaggtcaaggcctcgtacctggccgccgtggcgctgggcaaggaaaagtgcgcgctgatctcgcgcgccaaggcgaccgagctgctgggcaccatgctgggcggctacaacatctcgccgctgatcgagctgctggacgatgccgaagtgggcaccgtcgccgccgaggcgctgaagaagaccctgctgatgttcgacgccttccacgatgtgaaggaaaaggccgaccagggcaatgccaacgccaaggccgtgctgcaaagctgggccgacgccgagtggttcaccagccgtccggaagtgccgcaaagcctgaccatcaccgtgttcaaggtgccgggcgaaaccaacaccgacgacctgtcgccggccccggacgccaccacccgcccggacatcccgatgcacgcgctggccatgctgaagaacaagcgcgaaggcgctgcgttccagccggaagaagacggcaagcgcggcccggtcaagttcattgaatcgctgaaggaaaagggccacctggtcgcctacgtgggagacgtggtcggtaccggctccagccgcaagtccgccaccaactcggtgctgtggttcaccggcgaagacatcccgttcatcccgaacaagcgcttcggcggcgtgtgcctgggcaacaagatcgccccgatcttctacaacaccatggaagacgccggcgcgctgccgatcgagctggacgtgtcgaagatggaaatgggcgacgtggtcgaactgcgcccgtatgaaggcaaggccctgaaggacggcgcagtgatcgccgagttcaaggtcaagtccgacgtgctgttcgatgaagtccgcgccggcggccgtattcccctgatcgtcggccgtggcctgaccgccaaggcgcgcgaagcgctgggcctggccccgtcgacgctgttccgcctgccgcagaacccggccgataccggccgcggcttcacgctggcgcagaagatggtcggccgcgcctgcggcctgcctgaaggcaagggcatccgcccgggcacctactgcgaaccgaagatgacctcggtgggctcgcaggacaccaccggcccgatgacccgcgacgaactgaaggacctggcctgcctgggcttctcggccgacctggtgatgcagtcgttctgccacaccgccgcctatccgaagccggtcgacgtcaagacccaccacacgctgcccgagttcatcagcacccgcgggggcatctcgctgcgcccgggcgacggcgtgatccactcgtggctgaaccgcatgctgctgcccgacaccgtcggcaccggcggcgattcgcacacccgcttcccgatcggcatcagcttccccgcaggttcgggcctggtggcctttgccgccgccaccggcgtgatgccgctggacatgccggaatcggtgctggtccgcttcaagggcaagatgcagcccggcgtgacgctgcgcgacctggtcaacgcgattccgctgtacgcgatcaagcaaggcctgctgaccgtggccaagcaaggcaagaagaacatcttctcgggccgcgtcctggaaatcgaaggcctgcccgacctgaaggtcgagcaagcgttcgagctgtcggatgcatcggctgagcgctcggccgccggttgcacggtgcgcctgaacaaggacccgatcatcgaatacatcaacagcaacatcacgctgctgaagtggatgatcgcccagggctaccaggacccgcgcagcctgcagcgccgcatcaaggccatggaagcgtggctggccgatcccaagctgctggagccggacgccgacgccgaatacgccgccgtgatcgagatcgacctggccgacgtgcatgagccgatcgtggcctgcccgaacgacccggacgacgtcaagacgctgtccgaggtggccggcgccaagatcgacgaagtgtttatcggttcgtgcatgaccaacatcggccacttccgcgcagcctccaagctgctggaaggcaagcgcgacatcccggtcaagctgtgggtggctccgccgaccaagatggaccagaagcagctgaccgaggaaggccactatggcgtgttcggcaccgccggtgcccgcaccgaaatgccgggctgctcgctgtgcatgggcaaccaggcacaggtgcgcgaaggcgccacggtgatgtcgaccagcacgcgtaacttcccgaaccgcctgggcaagaacaccaacgtgtacctgggttccgccgaactggcggcgatctgctcgcgcctgggccgtatcccgaccaaggaagagtacatggccgacatgggcgtgctcaacgccaatggcgacaagatctacaagtacatgaacttcgaccagatcgaggacttcaaggaagtggccgacggcgtgacggtgtaagccgcgcagtcaggctggcatgaagaaggggccccgcttgcggggcccttttgtatttggatttcgccggcttgacgggtggcatacgccaccaccaccaccaaattgccgctgggatgttccctctccccatgaggggagagggagaacaccttgctcaggctagttcgggcggttttggagcacccagcggaatcccctggcgcgcggcgtacgccaccacctccgcggtattgtgcaggtcgagcttgcgcatcaggttctcgcggtgcttgcgcgcagtcagcgggctgatgtcgagttgcgcggcaatgtcgccggcggtggcgccgcgcgcgatcagcatcaggatctgcagttcgcgccgggtgagcgtggcaattccgtccggtgccgcggtggccggtgcagtggcgcgcgcggccacgaagttgcggccctcgcgcagggccatgagcgcgggcaccagttcgctgatatcgccgctcttgaccaggtagccattggcgcccgcatcgatcgccgcgtgggccatgcccgcgcccgcgctgccggtcagcaccaggatgcgcagcgcaggatgccttgtgcgcaggcgttccacgaaggccaggccatcgacgccgggcatgcccaggtccatcaccagcaggtcggtcggtacccgttccaggagccccagcagttgcgcgccatctgctgcctcgcccgccagcaccaggttgccgacgccggacagcacctgcttgaggccctccagcacgatggcatggtcatcggcgagggccacgcgggtcgggacggaaaagcggctcatcgcggcaggtgcatcggtggcgaatgggaaagggaaggtggtataaaacggcagcccgtcagtccggcagctgcaggtggcctgctgaatgccccaatgaaccggcggccggctggattatagcgttgcacgcccaacctgccccacggcctacctagcatgcgcaagcttccgttgtcctgttgccgtaccgtttcctgccgcccgcaacgggcgctcgcatcatgacagccacaggcaccggattgccgccggcctggcagcccggagatgtgccggcggcgatggtggacctgctctaccgccagtccaacgcggtcctgtttgccaacttcgtcattgcgctgccggtggtctatgtgctgcgtcccagcgtgccgctgcccatgctggccggctggatggccgcggtgtacctgctgaccacgctgcgcatcggcctgtcgcggcgctacttccggcgcgacggcagcacgccgccgcaggtgtgggcacgccgcttcatggtgctgtcctggctgtccagcctgctgtggggcgccgtgggctctgccatcctgctgccgcccgagccgcagctggtggcgttctgctgcatcgtgctggccggcatgtccagtggcgcgatcccgtcgctgtcggcgcatccggccacctaccgcggttcagtcgcggccatgctgctgccgttcaccatctattgcctggtgcagcaggggccggtgtatggcgtctacgcgggctttgccgcgtgcctgctgtgcgtcaacatctactacagccaggtcacctatcgcgcgctgcgcgatggcgtgacactgcgcttcgagaacgtcgcgctgatcggcgagcttgagcgcgagcgcgaccgcgtcaccgccgcggaccgggccaagacgcgcttcctggcggccgccgggcacgacctgcgccagccggtgtatgccatcggcctgcaggcggcatcgctgctgactctgggcgagcgcggcgatgtggcaggcggccaggcgcatgccatcggccaccggctgcaagccacgctggcgcgcatggacaacctgctcgacggcctgctcgacgcctcgcgcctggatgccggcgtgatgccggtgcgccgccagccgctgcatctggcgcggctgctggccgagctgcgcgacgagtacgccgagcaggcgtgccagcgcggcagcgtgctgcgggtggtgccggcgcgcgcgtggatcgacagcgatccggacctgctcaagcgcatcctcgacaacctggtggccaatgcgctgcgccatgcgccgcgtgccagcatcctggtgggcgcgcggcgccgcggcgatgccatggagatccaggtgatcgacaccggcccgggcatcgccgcggcccagcagtcgcgcgtgttcgacgaatacgcccaggtgccgggccttgccatggcaggcgacgaccaggcgggcgcaaagggactgggcctgggcctggcgatcgtgcggcgcctggcggcgctgcttggccaccaggtgggcctgcgttccgcaccggggcgcggctgcgtgttttcggtgcgcgtgccgctggctgccgccgcggcgcaggtgcatccagccacccccgccattcccgcggccgctggcgagccgctctgcgtgatgctggtcgacgacgacgcgcaggtgctgggcgcgctcaccgaactgctgtcgctctggggccatgtggtctacggcgggcgcaccgttgccgcagtgcgcgctgcgtaccgcgccgccagccaggacgggcccgccccggtccacctgatcctggccgactaccggctggccgaaggcctgaccggcatcgctgcggtcggcatgctgcgcgccagcctgggccgcgcggtgccggcgctgatcgtcaccggcgacaccgcgccagaccggctgcaggcgctgcatgacagcggcttcccggtgttgcacaagccgatccagggcgaggccttgcgcgcggccctgcatcgcgcggtgcaactggccgaggccgcctgaggccctgcgctgcatgcatggcaggagcggtttatgatcgggcttttccgttgtccggcgccttcttgcgcagtgcgcaagcgcctgaaccaggagccagtgtgcccgatctgtccgctttccccatcacccgcaaatggccggcgcagcatcccgaccgcatccagctgtattccctgcccacgcccaacggggtcaaggtgtcgatcatgctggaggagaccggcctgccgtatgaaccgcacctggtgcgcttcgacgccaacgaccagatgtcgccggagttcctgtcgctgagcccgaacaacaagattcccgccatcctcgatcccaacggtccgggcggcaagccgctggcgctgttcgaatcgggcgcgatcctgctctacctggccgacaagtcgggccagctgatcccggccgaccccgcgcgccgctacgaaaccatccagtgggtgatgttccagatgggcggcatcgggccgatgttcgggcaggtgggctttttccacaagttcgcgggcaaggagtacgaggacaagcgcccgcgcgaccgctacgtggccgaaagccggcgcctgctgaatgtgctgaaccagcggctggaagggcgcgactggatcatgggcgacacctacaccattgccgatatcgccaccttcccgtgggtgcgcaacctgcttggcttctatgaggcgggcgaactggtcggcatccaggacttcccgcatgtcaggcgcgtgctggaggccttcgtgaagcgcccggcggtggtgaaggggctcgatacgccgcaccgcggctgaggcagcctgcggcgtgcgcgccgcgggcgtgggcatcgtcctacacggcggcctccccggcgcctacagaggggcgggcggcacgcatcctatagtccaggaacaggcgcatcgccctgcgttgcctgaggagcccggaccatgccgatgcccatcaccttttccctgttgcgtgtcgttcttttggcgggcgccaccgctgcgctcgccgcctgcggtgaaacggccaagctgccttccgaagcgggctttggccccacgccgcagctgccgccacccaaccagaccgcgatccccaccgtcaagatcgcgccggccatcggctgggccgcgggccagcgcccggtgccggccgcaggcatggcggtgacggccttcgccgacaagctggaccatccgcgctgggtctatgtgctgcccaacggcgacgtgctggtggccgagagcaatgccccgcccaagcccgacgacggcaagggcttccgcggctggatcatgaagaaggtgatgaagcgcgcgggcgccggcacccccagcgccaaccgcatcacgctgctgcgcgacaccaacggcgacggcgtcgccgaccagcgctcggtgttcctaaaggacctgaactcgccgttcggcatggccctggtcggcaacgacttctacgtagccgccaccgacgcggtgctgcgcttcccgtaccagcccggacagacccggattacggccgcgccccagaaggtggtggacctgcccggcgggccgctcaaccatcactggaccaagagcctgatcgccagccgcgacggcagcaagctgtacgtgacggtgggctccaacagcaacgtgggcgagcacggcatggacaaggaggtcggccgcgccgccatctgggaggtcgacccgcaggccggcacgcaccggatctttgccagcggcctgcgcaatcccaacggcatggcgtgggaaccggtcaccggcatgctctggaccgccgtcaacgagcgcgatgaaatcggcagcgacctggtgccggactacatcacctcggtgcgcgacggcggcttctatggctggccctacagctactacggccagcatgtcgacgcacgcgtgaagccgccggcgccggacctggtggccagggccatcgtgccggactatgccgtgggggcgcacaccgcatcgctcgggctggccgccgccggcggcaacaacctgccggcgcgcttcagcgaaggcatgttcgtgggcctgcacggttcgtggaaccgcaggccgctggcgggctacaaggtgatcttcgtgccgttcagcaagggccggcccaacggcgcgccgttcgacgtgctgaccggctttctcgatgaggacggcaacgcgcgcgggcggccggtgggcgtggcgatcgacaagcaaggcggtttgctggtggccgacgatgtcggcaataccgtgtggcgggtcagcggcgcgaagtaggcgggccagggcgcggcagcggcggcaccgcaccgctagaatgacggcgtccccacacgccgagcccgctgccgtccatgtctctcacggtcttcgctgtcgtcctgctcgccgcgttcctgcatgccgcctggaacgcggtggtcaagggcggcggcgacaagatgctgtcgacggtgatggtggcggtgagcgccggactgacgggcgccgtggcgctgccggcgttgccgcagccggcgccggcgagctggccgttcatcgccgcgtcagtgggcgtgcacgtggtgtatttcgcgctggtggcacgcatctaccacaccgcggacatgagccagacctaccccctgatgcgcggcaccgcgccgctgctggtggcggtggccagcgtgggctggctgggcgagcacctgtcggcgctggcgtggagcggcatcgccgtgatcagcctgggcatcctggccatggcgggtggtgcccgcggtgcccctggcagccgtgagggcatgtggctggcgctgctgaacgcagtggtgatcgccgcctatacgctgatcgacggcaccggcgtgcgccgctccggcgcacctgtggcgtatgcattctggatcttcgtgctgaccgcggtgccgctggcggcgtgggcgctggtggcgcgccggccggcactgggcggctatgtgcggcgcaacctggtgttcgcgctggtgggcggcggcggcacgctggcgtcctatgggctgtcgctgtgggcgatgacacgcgcgccggtggccccggtagcggccctgcgtgagtcctcgatcctgttcggcgcgttgatctccgggctgctgctcaaggagcgcgtgggcgccgcccgcctgggcgcggcctgcctgattgccgccggcgtggccacgctgcgctttgcctgagggcacgtccgggtgccgctctgaacgcccggccgctgagcgccgccagcgctgtctatacttggttttaccggggtcagacggcggaggggcactgcgtccgcgcaaaccggcagcctggcgtcgacgccgaggagagggcatggaccacaccgcagattcgtttcgggcttttgagctggctggctgggaagatcccgaggtcgtcagccagtaccaggagcatctgtcgcacgtgacccggcaatcggtcgagtccctgctggacgaggcccatgtgaccagcgggctgcgcgtgctggatgtggccaccggctccggccatgtcgcggcgggggcggtgcggcgcggcgcagagtccgtcggcatcgatttctcgctggcgcaggtgcagctggcgcgcaagctccatccggatgtccattacgagcaggccgatgcgcaggcgctgccgttcggcgatgccagcttcgatgccgtggtcaatggcttcggcatgtgccacctgtccgaccccgatgccgcgctggccgaggccttccgcgtgctgcgcccgggcgggcgcatcgccttcaccgtgtgggacacgcccgagcgcgcggtcggtttcggcgcggtctatgccgcgatccgcgcctacggctcgatggaggtcgatatccccgtggggccgaacttcttcctgttcagcgatccgggccattgccgcaccgcgttgcagcaggccggctttgtctcgcccacctgccgcaacgtgccgcaggtatggcgcttctccacgcccgaccagctgttcgatgcgctggcccagggcaccgtgcgcgccgccgccacgctgcgcgcgcagactcccaaggcccgcgacgagatccgcgccgtgctgcgcggcaccgtcgccgcctatatgcgcggcagcggcttcgaggtgccgatgccggcagtgctggcggcggcggtcaagccctgagggcggggcttacgcacctgtggcggcgcggacgccgccgagggtgttggagatcgaccgacatccctgccgccagcgtcggcctggccccaccatcccattcccggaaagtgccgtaatccacgccgcaaccagccttgtggcggtggcacggtcattgcgcaatggacagcgagcgcggcgccgcggctcgttgtgccaccagccagcaatggcttcccggagaaccccgatgtacacccgaccccaatgccagacagggcaggccgcgccgcgcccgcccgcaatcctgcaccgctcgcgccaggccatggcgctgctgcgcgtgctgggcttatgcatcaacagtgtcgcctgcgcccagtccgaagcgccgcaggctgcagcgcctgccgtgcaggccgtgacgccggagcagaagtttgcgcccggatacctggaggccgttgccaccggttatgacaatgggttggccttgcgggagccggaaggcctcgcgccgctgaggctgccgcgcgaggcgcgcagcgcgccggcgccaggcgccgtgccggttgccatgccagcggcggtgcggccgcagccggcgcgctgacctggcggggctcccgggagcagggtggcgaaacaagtggcgcagtgcggcctttagcgcctgacctgttcctgttcgtcccgccctgccgacatgaagtcgttcgggaaggctggggtatttgagttcaggcctggggtgacgcggtccagtcttcgatgcgcaggcccggatacgtcgcaaagtcgcgcacgttgcgcgtgaccactgtcagatcctccgcaatggcatgggcggcaatcagcttgtccatgacatctgccttgcgttcgcgcctggcggcacgaatcgggccataggcgcgcgcggcttcggcgttcagcggcagcactgggacccgcgcgaccagcccgtgcaacgcgcgccgcgcagcctccggattgcccgaggcggttacaccgtattcgagttcggccagggtgatcgcagacagcaccacatcgccctcgaagcattgtgcaaagcgttcggccacctggggcggctggtgcttcatcaggtagatgcacatgctggtgtcgaacatatacctggccatcagaatccctcccgctcagcctgctcctggtcgccgcggccttgtgccatgaagtcggccgggaacgcggcgaaggcgtcgagcaggcctgtcaggcgctgtcgcacggggcggatccgcaactcatcgccgatccgctcgatttccagctgcatatcggtgtcggggtaggccagttccgcgggaatgcgcaccgcttgggagtttccgttacggaagatccgggtgaaaggcattgtggtttccatgtacatccttgtaggtacgagcatagcaccatccaatcagaagtacgtctgcgtgtgtacgtccataattctcaatctcgtctgtcattacctacaattcgtcacactggtaattccccgcccaatggacatcaatctcgcccgcaccttcctgcaagtcgtccgcaccggcagcctgctggccgcggctgacaagctgcatgtcacccagaccgccgtgaccgcgcgcatcaagagcctggaatcgcagctcaactgccgcctgttcgagcgcaacaaggcgggcgcacggctgacgcccgatggtcagcgctttctcggctacgccagccagctggtgcagacctgggaggcggcctgccgcgagctgccgttgccggccgggctggccagcctgtttcgtttcggtacggaaatcagcctgggcaacccgctggtgctgctgtggaccacgcgcctgcgccaactgatgccggcgcaggcggtgcgggcggaagtgggggaaggggcggagctgcagcgcaagctgcagtcaggcacgctggatgcggcgctggtctaccagccggagtacgcgcccggcatgcatgtcgaggcgctgatggaagagaagctgatcctgatccgctcgacgcagcgcgacggcggctatgtctatatcgactggggaccggaattccgctgccagcatgacagcgcgctgccggagcatgcgcgcgcctcgctgtacttcaacctggggccgctggcgctgcagtacatcctgcagttcggtggcagtgggtatttccggacacgcgtggtgcagagctacctggacagcggggtgctggcgcgcgtggaaggcgcgtcagagttctcttatccggtattcctcgtctgcgccaggacccccgcaggggcgtcgcaggatgccgtgcgcatcctgcgtgacatcgtgcgcgaagaatccgactggtcgcagcgctgggatttcccgcaatagcgcaaagcggtcagatccggaccggcaccagttggcccatcgggccgggcacggccaccaggcgccattgccgcacgcgccccacccggcggccgcgcccgccgccgcgcggcgggcgcggttccagcccggcaaagcggccatgccgctgcgcgcgttcgaacaccggctcgggcacccgggtcccgatcagccaggtgacggtgcctcccagcgccaccagtgccagcgccagggcgatccagaggacggcttccatgttccccgctccatcgaataggtatctgtgcttccagtattgtgcaaagcgttccggcgggtaaatgaaagttatttccacttcatatcaataaaattgcattcaagctggcttctccttcaaacctgggccgttcggctgcgggaggaaaaatcatcctttccgacgaatctcatagacgctgcacggcagacactcagccggtcactctcaaaaacaccaggagaccccgcatgcaacgcctgatcttcgaagccgaacacgacgccttccgcgaatccgcccgccgcttctaccagcgcgaggtggggccgcacggcgagcgctggcgcgaacagggctgcgtggaccgcgaagtgttccgcaaggccggcgagcagggctacctgctgatgtgggccgacgagaaatacggcggcgccggcgtggaggatttccgctatgagcagatcctgatcgaagagaatgcgcgccacggcgactcgggctttttcggcacgctgcactcgcggctggtggcgccgtatatcggccgcatcggcaacgaggaacaacgccagcgcctgctgccggcggccgcgcgcggcgagtcgatctttgccattgccatgaccgagccgcaggcgggatccgacctggccggcatgcgcacgcgtgccgaggaccacggcgaccactgggtgctgaacggcgccaagacctatatctcgaacggccagctggccgactacgtggtggtggtcgcgcgcactgatccggagcgcagccatggccttggcctctttatcgtcgagcgcggcatgcccggcttcgagcgcgggcgcaagctgcgcaagatgggcctgcactcgcaggacacctcggagctgttcttcgacaacgtcaaggtgcccaaggccaacgtgctgggcgagcccggccagggcttccgctacctgacgcgccacctggccgaagagcggctgattggcgcctgcggctacatggcgtcggcgcaggtggcgttcgacctcacgctggactatgtcaaggagcgcaaggccttcggccgggccatcggcacgttccagaactcgcgcttcaagcttgccgaactgcgggcgcagctggatgcgctgcagaccttcgtcgaccagtgcgtgctgcagcacaacgcaggcacgctgaccgtggagacggcggcgtcggccaagctgctcacgtcggaactgcagggacgcatggtcgacgagggcgtgcagctgcacggtggcgccggctatatggaggagtaccgcatctgccgcatgtacaccgacgcgcgcatctcgcgcatctacgccggcagcagcgagatcatgaaggagatcatcggccgcagcctggggctggatgaccgcatgaaggggtaagccgcctggcagtacagacggcacggccggcaacggccgtgccgtttttcatggttttccgattggctagggttttcgcgcagttaaaggcttttgtcagctttatgaaagccgtttgtaatgcgattcggtttgaatgcgtgcgggagatcgtgtccggtggcgtctgatgcaccaggacagcgggcgagggcgcaccaggacagccacgcttcgcggccgcattggcgggatcagggtcggatgaatatttgccgccctggtgcaccgttcggcgagcacggtcgtttaccgcagaccgttgtcgaaccgagcctgactgaccgtgccttttgtcttttcccgtattgccgtaggtgccctgctgctactgggggttctggcccggcccgcggcaatccttgccgccgaaggccccgccgatccgcttccttccgctgattccgcagatgctgccggtccttgcgtgccgccgccggcgggcgcgacgctgaccctggcgcaggcgcgcctggacgcactgcgctgcaaccgcgacatcatcgccgcccgccgcggcgtcgaagccagccaggcggacatacagatcgcttcgcagcggcccaatcccgtgctgagcctgggcgtgaccaatatcaacccgcatgccggcatcggctcgggcaacctgcgcagcaagaccgtggactctaccctgcgcgtggaccagctgatcgagaccgccaacaagggcggcctgcgcgtggacgccgcgcgcaaggccagcgcggccgccggcgaagtggtgcaggcggtggtggcgcagcagagcgccgcggcggagcaggctttttatgacgcggtggtcagccaggagcgcgtggcggtgttcaaggagatgctggcgctctacgaccgcacgcgccaggccagcgagacccgcctgaaggccggcgacgtctcgcgcgccgacgtgaccaagctgcagctagacgcgctgcgcgcgcagagcgacatgcgccaggccatgaccgaccacgcgcgcgacaaggcccagctggcgcaggccatgggcgtgcccggcacgcttgccggcaaccggctggtggcggactggccgccgctggatacgcccgtgccgcaggtcgatcccgacacattgcagcgccgccccgacgtaactgcggccgaggcccgcctggccgcggccgccgccgcgcgcgacctggcgcgcgccggccgcgtgcccgacgtgaccgtcggcgcgcaggctgagcactatccggtttccgccaccaataccaacggcagcggcaacagctacggcgtgttcctgacgatcccgctgtacgtgcgccacagcaacggcggcgaggcccgccgcgccgaggtggactactacgccgcgctggacgaccgcaaccgcgtgctgctggaagccggcaatgagatggaacggctgcgcagccagctcgaagccgcgcgccagtcactgcggcagatgcgcgacgacgtgctgcccgccgccgaaagcgtggccggcagcgccgagtttgcctacggcaagggcgccaccggcgtgctcgacctgctcgatgcccgccgcgcgctgcgccagacccggctcgattccgtcagcgcccagggcgattacgccaaggccctgtcggcctaccgcgccgcgctgcagacctccacgaccggcactgcgacaagctcgcgtccctgaaccgcagtcccagcgaatccaatgcactccctcctgtcacgcatgtcccgccgcatgtcttccgtccatttccccgccggcctgcccgcacggtttgctgccctgtccctgtgcgcgctggcgctggccgcctgcggcaagtctgaagcgcccaaggccgatgacgatcccaaggtcagcggcaataccatccagttcccggccagcgtgaagacgctgccgggcatcgccggcgaagccgccaggaccggcggcgagcgcatgctgagcctgcccggccggctggtgtggaacgaggacaagaccgtgcgcgtgtcgacgccgtttgccggccgcgtcaccgagatcctggtgcagcccggcgccaccgtgaaagcgggccagccgctggccagcctgacctcgcccgatttcggcgtggcccaggccgatgcgcgcaaggccgccgccgacagcgcggtcgcggccaaggcgctggcacggcagcgcgagctgtacggcgccggcatcatcgcgcagaaggagctggagcaggcgcaggccgacgccgcgcgcgccgcggcggacctgcagcgcacccaggcggcgctggcccagtacggcgcggccgcgggcggcgcgggcgcctcaggcatcgtaaaccagcgctttccgctgcgcagcccgatcgacggcctggtggtcgaacgcaacatcaacctcggcatggagctgcgccccgaccagccgcccgccgcgccgttgttcctggtgaccgatccgaccacgctgtgggcgcaggtcgatgcgggcgaggccgacctgagcctgttcaagccgggcgtggacgtgcagctcaccaccgctgcctggcccggcgagaccttctccggcaccgtggtcaagatcgccgactatgtcgatcccaccgcgcgcagtatcaaggtgcggctgaacgtgcccaacccggagcggcgcctgaaggcagagatgttcgtcaccgcgaagctgccggccgcgtcgttcaagggcatcgccgtgccgtccaaggccgtgttcctggccgacaaccgcaactatgtgttcgtgcgcaccaccgccaataccttcgagcgccgcctggtgcgcgtgggcgtgacgctgcccggcaccaccgagctgcttgaaggcgtgaaggacggcgagaccgtgatcaccgacggcaacctctacctgcaggacatcctgcgcgatgccactgccgtgaacgcggcgcgtgcgtccgagaagaagtgaggacggccgccacatgatttcgcgcatcgtcagctttgccctgcaccagaagctctttgtctggctgggcctgcttatcttcgtcgggggcggcctggctgcattcaagaacctgccgatcgaagctttcccggatgtctccgacatccaggtcaacgtcatcacgctgtacccgggccgcgccgccgaagaggtggagcgccaggtgaccatccccattgaaaccgcgctggccggaacgcccaacgcggtgcgggtgttctcgcatacgcagttcggcctgtcgttcatgatggtgaccttcaacgaccgcgccaccgacgtgaccgcgcgccagcagatcctggagcgcctgcgcagcgtggacctgcccgacggcgtgcatccggacctggcgccgctgtccaccgcgatcggcgagatctaccgcttccgcctggccggcaagggctataccgcgcaagagctgcgcacgctgcaggactgggtggtggagaaaaacctgcgccaggtgccgggcgtggccgacctggtcaccatcggcggaaccatcaagcagtacgaggtcaatcccaacctggcgcgcatgcgcgatgccaagatctcgctgtcgcagctgttcaccgcgctgcagcgcgccaacgccaatgccggcggcggcgccgtggcgcacggccggcaacagttcctgctgcgctcgctgggcagtttccgcacctcggccgatatcgccaacgtggtggtggccgagaaccagggcaccccgatcctggtcaaggacatcgccgacgtgagggtcggcagcgcgccgccgcagggcctgatgggccaggacgacgaggacgacatcgtctcgggcatcgtggtgatgcgcaagggcgagaacccgtcgctggtgctggaggcgctgaagaagaggatcgacctgctggacgaccagatcctgcccaagggcgtgaagatcgtgccgtactacgatcgctccacgctgatcgacaagaccctgcacaccgtgttcggcaacctggtggaaggcgcgctgctggtgatggcggtgctgtacctgttcctggccaacgtgcgcgccgcggcgatcgtggcgctgatcatcccgctggcgctgctgtcgaccttcatcgggctgacctgggtgggtattccagccaacctgctgtctcttggcgcgatggacttcggtatcatcgtcgacggcgcggtgatcgtggttgagaatatcttcaagcggctgggcgagctcaaggcgcagcagatcaaggacagcaaggcgcgcctgcatgccatcctgcaggccaccacggaagtgggccgtccgaccgtgttctcgatggtcatcatcattgcggcgcacatcccgatcttcacgctgcagcggcacgagggcaagatcttcgcgccgatggcctacacggtcacgggcgcgctgatcggctccctgatcctctcgctgacgctggtgccgctgctgtgccacctgctgctcaccaggaacatcgcgcacgacgacaacttcatcgtgcgccactgcaagcggctctatgagccgatgctggcctgggcgctggaccataagaagctggtggtgggttcggcgctgggcctgctggtggtgaccgtgggcgtgggcaagttcctcggcagcgagttcctgcccgagctggacgaaggctcgatgtgggtcagcttcgacctgccggcatcggtctcgatcgacgaggcgcgcgaccaggcgcggctgctgcgcagcgtgatccgcaagaccccggaggtcaataccaccatctccaaggtgggccgccccgacgacggcaccgatcccaagctgatcaacaccgtcgagatcctggtggacctgaagcccgagaagcaatggcgcgacggcttcaacaagcgcgccatcatcggcgagatcgacaagaacctgcgccagctccccggcatcgagcccaatttctcgcagccggtgcgcgacaacatcctggagagcatctcgcagatcaagggccagatcgtgatcaaggtgcagagcgacagcctggagcagaacaagaaggtggccgaccagatcctggccaacgtgcagacggtcaagggcgtgatgcgcgcctttatcgaccgtgacggcgaactgccgcagtacgtgctggagttcgaccgggcccaggccgcgcgctacggcatcaatgtcgccgacgtgcaggacctgatggaaaccgcgctggccggcaaggccgcgaccgagctgtgggagggcgagaagcatttcagcgtggccgtgcgcctgaagccgtcggagcgcgcgctgccgaacctgcccaatatcttcatgcagaccgcggacggcgcgcaggtgccgctgtcgcaactggtgacgttccgcgcggcatccggtgcgatgaacatcagccgcgagaacggccagcgcaccacctcgatcggcatctttatccgcgaccgcgacatgggcagcgtggtcaaggacatgcagaagctggtggcgaagaacgtcaaggccgacgacgtcaagatcagctggtcgggcgagttcgagaaccaggagcgcgccatggcgcggctctcgatcgtggtgccgctgtcggtgctggtgatcttcctgctgctgttcaatgcgttcaagtcgttcaagagcgccacgctgatcatctcgaacatcccgttcgcgctgatcgggggcgtgttcgcgctgttcctgaccggcatcccgctgtcggtgtcggcggcgatcggctttatcgcgctgttcggccaggcggtgctcaatggcgtggtcatggtcacctacttcaaccagctgcgcgatgaaggcatgccggtgcgccaggcggtgctgacgggctcgatggaccggctgcgcacggtgctgatgaccgcgctgctggccatgctgggtttgttcccgatggcgatctctcgcgccatcggctctgagacgcagcgcccgctggccatcgtcatcatcggcgggctgatcaccgccaccatgctgacgctgatcgtgctgcccaccttgtatgaatggatggtggggcgcaactggccggacgaagagggcgaagcgcctgacgagaaccggttgacgccgtcgattctgggctgacgaccgccctgacttcactggcaatttgcgcccctctcccgctgcgcgggagaggggcgccttgttctgcggcacgcatgctcgcccgccgtcgcgcacatgacgcgctgaccgcaccatcccccctccagcaaccaggtgcatgccccgccgcgtgcctcgcccgcattgcaatgtcggaatagtctgacgcgcctttcggaaccggacgcctgcttcccatacccccccgggcctactctgtacttacggcatggccagcagcatagccgccggcctctcatgcgtacctttacgcaatcacccggaaaggagatcgacatgttgaagaaatggctgaccgcagcagtgtgttcgatgatggttgccgcaccggcgggatttgcgctggcgcagatgaccgcaccaacaaccgcgtccggaacgactgcaaccggggcaagggcagactatgacgccgcggtgaagcaggctgatgcggactacaaggctgcctccgccaagtgcaatggcatgaaggacaacgccaaggacgtctgcaaggccgaggccaagcgcgaccgcgatgtggccaaggcccaggccgaagcccgccgcgacggcacgcagaaggcgaccgccaaggccgagaagaccaaggctgaccgcgactatgacgtagccaaggaaatgtgcgacgacaagaagggcaacgacaaggacgtctgcaagaaggacgccaaggccgcccatgaaaaggcactgatggctgccaaggtcgacaaggccgcggcgaccggttcgcgtgccgacgtggcggaagcccgtgccgacgcgaagaaggacgccaccgacgccgcctacaaggccgacaaggaacgctgcgacgcgatgtcgggcgatgccaaggacaagtgccaggccgatgtgaaggccaagtacggcaagtaagccttcgcggcatcccgccagcattggcgggccacgcaccgcaccacccgcaaggggacgcctccaatgcgcccccttgccaccggatgaaggagcatgagatgaactgggaccagatcgaaggcaagtgggaacaagcgaagggcaagatcaaggagaagtggggcaagctgaccgacgacgacatcgcgcagatcaacggcaagcgtgaccagcttgccggccgcatccaggagcgctatggctacaccaaggagcgcgccgaggaagaaatgaaggattgggaacgggacacgcgctggtaagcaatgcgtggcagctaggcaaggcgggacgccagcgggcgtcccgccttgctttttgcgtgcggcgcgtgctcggaacctggcacccccggaacgaggggtatgccggcgcgtatcgcacagcattaagcgcggattagctctgaatgcaaccgaatgatgcacgcgccacccgcgcagggcataacatgtcgcgtcgccgaccctgccatccgcccggcttgccttcgcgctccgcatgtacgcagccttgcccgccttcgtctcgtcgatcttcctcggttacggcctctatgtgctggtgaccaagggcgtgacgcgcgtctccacttcgttcttcctgctgtgcgtgaccaccttcgcctggcagggcacgtgggtgttcctgttccaggcctcgcatcccgatgtgtcgctgatgctggcccggctcggctacctcttcatcctgttcctgccgaccaccttctaccacttcatcgccgaagtcaccgagtgccgccgcgagcggccgttgctgctggcctcgtacggcctgagcctggtgctggcggtgctgctgctgaccaccgaccaggtggtctccggctactacagctatttctttggcgactatcccagggccggcccgctgcatccgctgcacctggtgcagacggtgctggtggcgctgcgcagcgcctggctgctggtggcggcgcggcgcaatgcaaccgccgaacgccgcaagcgctacaagctgtgcctggtggcggtggcgctctattcgctggcggcggtggactacgccgtcaactatggcgcggccttctatccgccgggcgtggtgttcgtggcggcaagcctgggcatcctggcggtcagcgtggtgcgctacgacctgatgcatccgtattcgctggccgccaccgtggcgcacgaggtgcgcacgccgctggcgaccatccgcatgcaggcgcaggagctggcgcgcacctggccgcaggtgctgcatggctaccggctggcggtccagcaggggctgtgcgaggaccgcatgcggcccgggcagcttgagcgcgtgtcgagcctggtcggcgccatcacgcgggaagtcgatggcaccagcaccgtgatcgacatggcgctggcctcggtcacgctggagcggctggaccgcagcagctttgccccgcacggcattgccgactgcgtgcatgcggcgctggagcgctacccgttccagggcgaggagcgcggctgcgtgcaggtgcgcggcatcgaccagggctggcgctttgtcggctccgacacgctgctggtctacgtgctgttcaatctgctgaagaacgcgctgcatgcgatccgcgcggccggcggcggccgcatcgacatcaccggcgcgaccgagggccagtaccacgtgatccgctttcgcgacaccggcccgggcattgcggccgacgtcatgccgcgcatcttcgatccgttcttctccaccaaggcgcatggcaccggtgccggcctcggcctggccttctgccggcgcgtgatcgagaccttcggcgggcgcattgagtgcgagtcggtgccggccgtgcataccacctttaccctcagcctgccgcgcttcaccgccatggccgacagccggctgcgcaccagcaccgccggctgagccacggccggcggtgccggattcagacccgcgcggggtcagccgcgcctggctcagctggccagtgccggcagcgccagttcatattccctgacccgttcgatgatgcccgccggaaagcgcgtgatgcgcttttgccggtcggcgaagacgatctgctggtagcccagcaacaccggcttgccccccacgcagaagcggaacagcaggtaggccgagcactgccggacctggaaggtgttcaggtagcaatccacgcgctggaacgggaacgtctcctcgacatactcctggtgcgcgcgcttggtcacgaagacgccgcccgcggccagcaggttgtcgtggatgcattcatggaaccagcgctcccggcaaataccctgccactcgaaatagcgggcgaagtaggtgttcataaaggcattggaatccttgaggtagatgtcgatcgcatggtggaaggtcttgtgcgaagcggtctcgaacgcgtcgggcgccagttgggccgcgccgcgattcaggatttgggggatcacgtctcgcatcaacataagttgactccttgagatggctgcaagcggcagccacgcctgcccccgggaaggttggggcatggtggcattctgtccgcttgggcagtgtcaaggtgtgcgctgaagtggggggtgcggcacgttccggcgcgtgacgcacgggcgacaaaagtcccggaatgcacgcccgggcctggcaataccggagcggcatggatcggcgttaacccgagtagtctaggtttatagacttttatatagtcgtccggccaggctgcctccgggcggcccacgcctcgccccttttccccgacgttcaccggcgtttcccaacctcccttgccgcatggcagacaccacgtccagcgaactcctcgcgcgcagccgccagccggtctacctgcagctggccaccatcttccgccgccagatcgaaagcggcgcctggcgcgagggtgagcgcatcccgtcgctggaagagctgtgccgccagtacggcgtggcgcgcatgaccatgcaccatgccttgtcgatgctcgatgaagaagggctggtggcgcgctcgcgcgggcgcggcaccttcgtcaaggcgccgtgccagtcgcggcggcaggtgtcgctgtcgaccagctgggacgaggcggtggcggtgggcgctcagctggacaccgaagcgatggtcgaatccgccggcaacgtgccgctgcccgccgatctcggcattccgtgccccggtgagcgcgccgccgaataccacttcctgcgccggttgcaccggctggaaggacggccgttcgcggtgggcgaggtctatatcgaggccggcgtctttgcgcgcgagcccgaggccttccgccagggcgcctcggtgccggtgctggaccgcttccccggactgtcggtcagcaccgcgcgccagcgcctgtcgatcgtcgcggccggggccgaatccgccgccgcgctggcgcttgccgtgggcgcgccggtggctgagctgcgccgttttgcctgtgtcccgggcgagcgcggcgagctgatcgtctactacgcacgcatcgaattcccgaccgactttgtctgcctggatttcgacctgctggcggcgcggccgtgcccggcctgacgcctcccgtgcaaccaatgccaacctgctgacccagaacctgagcggaacccgagacatggaaactacccaaccgatgaacggcgccgagagcctggtcaagaccctgctcgccaacggcgtggacacctgctttgccaacccgggcaccagcgagatgcacttcgtcgcggcgctggaccgcatcccgggcatgcgctgcgtgctgggcctgttcgaaggcgtggtcaccggcgcggccgatggctatgcgcgcatggccggcaagcccgccgccacgctgctgcattgcggcccggggctggccaacggcctggccaacctgcacaacgcgcgccgcgcgcagacgccggtggtcaacatcatcggcgaccaggccacctaccaccggccgctggacgcaccgctgaccgcggataccgaaggctgggcccgtccggtctcggtgtggacgcgcacggccacgcaggctgcgtccgtcggcgccgatgcctcgtccgcggtgcaggccgcatgcgccgcgccgggcggggtcgccagcctgatcctgccttccgatgtgtgctgggatgcgggcggcgtggtggccgcgccgctgccgccgctggcggtgcccaaggtctcgcccgacgccgtgcagcaggccgcgcgcgtgctgcgctcgggccagcccacgctggtggtgctggggggcagcgcgctgcgcgaggcgccgctggccgatgcgcaccgcattgccgcggccaccggcgcccgcctgatctcgcccatgtccaatgcgcgcgtgtcgcgcggcagcggccgcctggcggtggaccgcgtgccatattcgggcgacgtcgcgcgcgacaagctggccggcatccgcaacgtgatcctggtcggcgcaccggcgccggtgacgttctttgcctacccgggcaagtcgccgcgcccgtatccggaagatgccgtgatccacgtgctggcacgcccggaggaagaccttgccgaagcgctggcccgcctggccgacgaggtgggtgcacgcaatgcaccgctgccggctgccgtagcgcccgcatccgttgagcccgcccgcggcgcggtcacgtccgaggcggtggcacgtacgctgaccgccttgctgcccgaacaggcgatcgtggtggaagagagcatcagcttcggccgcgccttctatccgggcacggtccatgcggccccgcacgactggctgcaactgaccggcggcgccatcggcgaaggcctgccgctggccgtgggcgcggcggtggcggcgccggaccggcgcgtggtggcactgcaggccgatggctcggccatgtacacgctgcagtcgctgtggaccatggcgcgcgagcagctcgacgtcaccgtggtgctgctggccaatcgcaagtacgccatcctgctgggcgagctcgcgggcgtaggcgccaacccgggcaagaccgcgctggacatgctggatatcggcaatcccgacctggactgggtcaagctggccaacggcatgggcgtggagggcgcgcaggccagggacatggaaagttttgccgacctgttccgcatggccaatgcgcgcagggggccgtttgtgatcgaactggtgatctgagcgcagcgctttccggattcaaaaatccagccttcggcagatgtgaattgttgcaatgcacagactgcggcaagctgattgctgtgccatggcaggtccatggcggcaccatcaaaagtgaaggagactccatgccccaacaacaagcggcggtgggtccggacaaggcttacgcggaccagctcgccgctggccagttccgcatccagcattgccaggactgcaagcgccacgtgtttttcccgcgcaatatctgcccgcactgcggcggcgacacgctcgcctgggtcgagcccaaggggaccggcacggtctactccaccagcgtgatccgccgcaagccggatgccggcggcgactacaacgtggtgctggtcgacctggatgagggcgtgcgcatgatgagccgcgtggaaggcattgcgcccgccagcgtgcgcatcggcatgcgtgtgcaggcacgcgtggcgcagggcaaggaaggcgaggccgctctcgtcgtgttcgatccggtggagggctgaggccatgagtttgtcgaatttgcgtggcagcgtcgccatcgtcggggtcggccaggcgggcctgggcgaggcccacggcaagactgaaatggaaatcctggtggaggccgccaaggccgccgtcagggatgcggggctgtcgatgcgcgacatcgacggcatcgccaccgccagcgtcggcgccagcatgtgggtgatgccggtggccgagtaccttggcatcaagcccaagtttgtcgacagcaccatgatcggaggctccagctttgtctcgcacatgctgccggcgatgatggcgctggaatcggggcagtgcgatgcggtgctggtctgctacggcagcaaccagcgcacctccacggttggccgcgccggcatctccaaggtgcgcgcggtgctggacccgcagccgtatgagcacccgtacagcccgctgcagccgatcacgtcatatgctctcgccgcggcgcgccatatgcaccagtacggcaccacgcgcgagcacctggccgaggtcgccgtggccgcgcgcaagtgggcgcagctgaatccggaagcgatgatgcgagacccgctcagcatcgatgatgtgctcaatgcgcgcatggtgtcggacccgctgtccgtgcgtgactgctgcctggtcaccgatggcgccggcgcctatgtgatggtgcgcgcggaccgcgccagggacctggccaagccgccggtctatgtgctgggcaatgccactgccacgtggcaccggcagatctcgtgcatgccggacctgaccgtcacggctgccaaggaatccggcgagcgcgcctttgccatggcggggctcaagccgtcggatgtcgatgtggccgagctctatgatgctttcaccatcaacacgctgctgttcctggaagacctgggtttctgcgccaagggtgagggcggccagtttgtcagcggtggcggcattgcgccgggcgggcggctgccggtgaataccaatggcggtggcttgtcatgcgtgcatcctgggatgtatgggatgttcatcaccattgaggcggtgcggcagttgcgtggggaatgtggggagcggcaggtacgggatgccgaggttgccgtggtgcatgggaatggggggacgttgtcgagtcaggctacggcgattctggggactggggcgacggtttaaggcgggagcgggggggctattggcttggcgccatgcgggcctgtcgcccccaccccaacgcagttcaatcccccaactcaggccacccctgcccgccgccggacccgggcaattgttgcaccatgtattcatgcaaccgcgacagttccagcgcaatgccatccggaaacccctgccgcccaccccgcttgtctatcagcagctcaaccaggaaagcacgcagagccgccgggttggtagaaagcgcagccaggtggttgccgatgcgcgcatagcggcggcacagctcaacggggcgcgcctcggccggcagcgatgccagccaccgcatggcgacgtctgacagcaacgtatctttcggcgacggcgggcgccgcacgccgctccagtcaggctcggtttgcactggcggcgcgccgtccagtaccttctttgcttcctcaacggtgacgaattcaaaagagaggggttccataccggctccgggatcaggccaacgcgcactgcgcattaacgcgcattctagcgattacggcgcttcgcgggctagtttgatagccatgtcttcaatgaaccgaatgcctcagccttcgtgcgcttgcttcaccacctgggctacaccgggcgcgccacattttcgccgggttttaagaaagattcaggggtgatataagaaaacagaaacgccgccccccttgccagggggcggcgtttgcggctaacacaccggccgcttcaggccacctgttcgcgccgcagcggcaaccgcctcacccgcaggttccgtcggccacgcacacgccgcgcaccaccatctcgcccatgaagtccatggaagcctggtcggcaatcgcgtcgcgcagcgcatccagcgcggcgtcatggggatcgctggcattgcctgcctccagcggcgtgtcatgccagcgccggggtaaggcagcggggtcgatatcgacgccggcacctgccgccagcgcagccagcaccgcggcctccgcttcggccatggcgtcggcggacaggtccctggcgcgcccctgcccgaaactgtcgaacgcctgatccggcggcccgctcagcagcttccacaaggccagctcggtcagcggcgagcagttcacggtgcgcgcgcccagcaccaggccatgcagccgcaggcggttcggctcgccctgcgcgagcccgccctcgcagcgcaccatcagcgcgccgcccggcactgcggccaggcggaatgcgccctttgcatcggtggttgtgttgtgcacttgtccttgcgcatcgcgcaactgcacggtggcgcctgccagcgcggcgccgacggcagccgtgccgctcacttccggcgcatggtcatccccgcatgctgcgaccgccgcgaccccgcatgcgagcacgaggtggcgccaggatctaaggtccttgcccatggttgctccgcctaaggtgccagggtggccagctcgcggcgcgagcggttgaacaggccgcgcgccagcggcgtcgggcggaagtcgacgtcaagcgccgagatcgtgatgaacttggccaggaaggccggcgtctccgcgatccgcgccagcgctgccgcttcggtctccggcgcgcccacgtcgatcgataccgtgttgtcggcattgcgcttgtaggcggtggtaaaggaatccaccgtgccaggcgtggtcaggcgcacgccggcaggagtcccgccggcagcgatcgggtagttgatgctcagcgggtgggccaccggcagcaatggctggccggctgcgcgcgtggcttccaggctggcaatcacgcgggccaggaaggccccggccctggggaacgcggccacggtgctgccgaagccggtgcgtgcctcggcaaagtccacgccaacgctcagcgcgatgccgggcacgccgcggcgcgcggcgaacagcacgttcatcaccgtgcccgagtgcgggatggagtccgacaggttctcgccgaaattggccccggagacgaccaggtccggcgtgaagctgctttccggcccgacgatcttcaggcccatggcggtggcgtccaccggcgagccgctgcccaggtattccgggttggtggcattgagcgcgccgcctgcgacgaaggtggccttgacccggtgcacgcagtaggtgtcggcgctgccggcgagcggatccactaccagccgggtgcgcccgtcgggcacggcataggcagcgcccgagccgctctggttggtggccggcccgaccgtgatgacgcggtggccggcgtcctgcagggccttgcggaccgcggtgatgccaggtgcggcgcagccgtcgtcattggtcagcaggatattgagcgcgtgcgcggggctggccgcggcggcgagtgccgcggccgcgataccgaggctagcgagccgcaggcgggtgggaagtcgaagcatgggaacctgtctccattctctggtgcctgatgaaagccatgcccggccgcgcagcggcgccgccaggcttgatcgaaaccggggcgacagcgtcacggcaccagcaggccccgttcgcgcgccagcgtgatcgccgtatcctcgatcatgtcctcctgcccgcccaccagccgctgccggccgagctcgaccaggatctcgcgcgcggggatgcggtacttggcctcggcgcgcttggcgaacagcaggaaggacgagtacacgccggcatagcccagcgtgagcgcgtcgcggtcgatgcggatggggtggtccatgatcggcaccaccaggtcttcggccacgtcggcgatgcggtagacgtcgacgccggtctcgatgcccatgcgctcgcacacggccaccagcacttccatcggcgtattgccggcaccggcgcccagtcccgccgcggcggcgtcgatgcggctggcgccgcaggcgatcgcggcgagcgaattggccacgcccatggcaaggttgtggtggccgtggaagcccagctcggtctcggggcgcagcgcctgccgcacggcgcccagcttctcggtgacgtcgtgcggcagcatgtgcccggccgagtcggtgatatacaggcagttggcaccatagctttccatcagcagcgcctgctgcaccagcgtctgcaccggtgccatgtgcgccatcatcaggaagcccacggtatccatgcccagcttgcgcgccataccgatatgctgctccgagacatcggcctcggtgcagtgggtggcgacgcggatggtatgcacgccaatctcatgcgccatgcgcaggtggtcgacggtgccgatgccgggcagcagcagcgcggagacgcgcgcctgcttcagttcgcccagcaccgcgcgcaggtattcctcgtcgctgtgcgcggggaagccgtagttgaccgaggcgccgcccaggccatcgccgtgggtgacctcgatcagcggcacgccggcggcgtccagcccgcgggcaatgtctttcatctgttccagcgagatctggtggcgcttcgggtgcatgccgtcgcgcagggtcatgtcgtgcagggtgatgtgttggaccatggctggctcctcaggcgttggcggattcttgcgcgctgccggcgcgcatggcggcggcaatgcactcggcggtgcgggcggccgaggcggtcatgatgtccaggttgccggcatacttgggcaggtagtcgcccaggccctcgacctccaggaagatcaacacgcgcttgccgtcgaacaccgggccgttcttcagcgtgtagccgggcacgtacttgcgcacttcggcaatcatgtcgtgcaccgaggcggtaatcgcggcaacgtcgggcgcatcgtcggtcaggcagtggatggtgtcgcgcatgatcagcggcggctcggccgggttgatcacgatgatggccttgccctggcgcgcgccgcccacggcttcgatcgcgcccgccgtggtgcgcgtgaactcgtcgatattgcggcgcgtgccgggcccgaccgagcgcgacgacaccgttgccacgatctcgccataggccaccggctgcacgcgcgagaccgcatacaccatggggatggtggcctggccgccgcacgtgaccatgttgacgttcatctcgttgctgccgatatgcgcgtccaggttgaccggcggcacgcagaacggcccgatcgccgccggcgtcaggtcgatcacgcgcacgccgcgcgcggtcagcctggccgagtgctcggcgtggacgtaggccgaggtggcatcgaaggcgatgcggatatcgtcggcctccaggtgcggcagcaagccgtcgatgccgtcgctggtggtcttcagtcccagctcgcgcgcgcgcgccaggccttcggaggacggctccacgccgaccatccagaccggttccaggatgtcgctgcggcgcagcttgtaaagcaggtcggtgccgatattgccgggcccgatcagggcacatcggatcttgttcatggggtctcgcttggcaaagtcaggaagtcaggaaagtcgtgtaagtcagcggaacacggcgctgcagccgccgatgccggtgatatgcatggacagccggtcgcccgcctgcaccggaatcagcgccgccagcgaacccgacaggatggtctcgccggccagcagcggaatgccgaagctgcccagggtgttggccagccacgccaccgcgtcggcgggatgccccagcgcggcgctgccaagcccggtggcgacgcacttgccgttcttctcgagcgtcatcgcgcatgcgcccaggtccagcgcgtgcgggctgacgctttcctcgccgagcacatagacgccgcaagaggcgttgtcggcgacggtatcctcgatgcggatgcgccagtcccggatgcgcgagtcaacgatctcgaagcaggccgccaccgtttcggtggcgtcgagcacatcggcgcgcgtcacgcccgggccgcgcaggtcgcgccgcaggaagaaggcaatctcgccctcggcgcgcggctggatcagggtttcggtggggatgggctgcccggcggcgtactgcatgctctgcagcaggatgccgaagtccggctggtgcacatccagcatctgctgcacggccgcgctggtcacgccgatcttcttgccggtgacgcggtcgccggccgccagccggtgggcgataaagccttgctggatgcgataggcagcgtggacgtcgagccccagtccgcggccgctgagcggcggcaccggcgagcgcgtgaccagcgcatggtggagttcattgctgagcgtggtgatcaggtcggcgttcatggcaggggagggtcgggccgcactgccgcggcggcagcgcgccgcggcagttcgggtcaggacaaaaggtcagaacgagtacttggcgttgaaggccacgtagtcgcggtcagccagcggacggttggcgatgttggccccgccgatgaacgcggcgtaggtcaggttgagctccaggttgttcaggtacttgaaggtcagccccacgctggcgcgcttgtcgccatagcccaacagtgtgccgaaggcgccggccaccgccgactggccgctgaactgctgagcgtaggtgagtggcacactcatgtcccagccatcgaacacattgttgtagttcagcgaccagcccacctggaacgccgccgagttgcgggtgttcgacagcttgctgaagcccatcaccgggtccacgtcgagcacgtgcaggtaggccacttcgcccagcagcgtctgcgagtcggccaggaaggtcgggcccaccgagtagatcgcggagagctggccctgcagcgccttgccgcgcgtcgcggtgggcgagccggccacgtccaccagcatcggcacgccgtccttgtagctgacttcaccggcgacgttggcgcccagcatctgcgtggagaagctggcgccggtcaggttgatgccgccgtagaacttctgctggtattgcagcgtgggaaagagcgaggtgaccacgctcgggttcttgtcgtgatagcgcagctggtacagcccgatctcggtgctgtcaaatacgcggaagcgcgcgcccacgccccattgcccccagtccgaggggcggatatccgggccgcgcgggatgttgaaaccgggcccgatgatgaactccgcgcccgggccgaccacgtcggtggagctgaaatagctgcccggtgcgaagatctggttcggcttgtaggtgaactggtaatagcccatcacgctgaatgccggcgtgacctgcagctgcagcgacgcctgcggcaccggcagcaggatgtccttgacctcggcgcccggcacgaaggccttggtggcatcggcaggcccttgcgcgccggcgatattggcgaagaacaggctctcgccccaggcgaccacctggttgcccagcttgaagctcagctgcgtgctgccgatcggcgccgcgccatagacataggcatcgagcagttgcgcgcggtgctcgtgatagtcctgcgccgagttggtgaactggttgaacggaccgctgtggttgaccgtgaacggcgcattgttcgagttggtgccgctgtaggcccagtcctggaacacgctgccgcgcaccagcgcgccgaagacgtcgtgcttgagatgcgcttcgcccagcagcgagacgcggttggcgatcaggtcgccgcgcttgaagttgcggttgccatcgtcgccgttgatattggcggggctcagcagtgtgttgctctggtggccggtgcgcaccgccgcgccgtaggaggcggtgacgctgtagtcgagcgtggtgtcgtggccaaggtcgatggtgtcgcccgccctcgctggcgttgcaagcagcgcggccagtgccgccgcggcagcgattggccgcagccggttgcggcgtttcagtgggccgagttgtggatggtgcatggtggtctcccccgtggtgtcggtgttggttcgttgcctggcacttcgaatggcgctcgcctggtcgcaagcgtagagaggggcagccatgcacaaatcggcagaacggactaggcggtttccctacaggcgggccgctcagccgcgattgaccgaagcggcgtcgagaaaggccgggcgctcgccgccgccatcgatcacgagattggcgccagatacgtacgacgcctgcggcgatgccaggaacaggcacgcgccggcgatgtcgtccggatgcgcgagccggcccagcggcaccgtcgcggccatggtgcgcaacgcctcggggtcaccgtagtgctgctgctgcgaggtctcggtcagcaccacgcccgggctgaccgcggcaacgcgcaccttgggcgcccattccaccgcgagcgtgcgcaccgcattgaggatgccggccttggcggcgccataggccgccgtgccgggcgaagggcgcagcgcgctgacgctgccgacgaacagctgggtgccgccgccagcctgttgctgcatgcgtgcattggtgcgctgcgcgagctgcagcggcgccaccagattgagccggatcaccgattccagcagccgtggcgaggcctgcgcaaccagcgcgaacggcgagccgccggcgttgtggatgaccacgtcgagcgtcgggctggcgtgcgcgatctgcgccagcatggcatcgacctgttcgatgtcgcggatgtccgccgggatgaagcgggcgctgcggccatccgcggccggcagttcgctgtcgtcggcgggcgcggtgcggccgcatacgaagacctgcgcgccggcgcgcaggaaggcctcgctgatggcgcggccgatgccgcgcatgccgcccgtgaccagcacggtctggccggtgtagtcgaatcctgtcatgggtcccccttgatgcatggagcgcccatcgtaggagaagtggccgtccggatcgtagtccgaatgaacgatgcccgcgcgggcagcgctgcgcaatatgctgggcaaaccacgggagacgccctcatgtccgctacgtcacagcacacgcctttgtccccacacccgaacctgccggtcgggcgcttcgtcatcacgtcaacgggcctgcgcctgcactgcctggactccggcagcggcgagccggtggtctttatccacggcagcgggccgggcgcgagcgggcacagcaacttccgccacaacgcgccggccttcgccgaggcgggccttcgcaccgtggtggtggacctgcccgggtatggcctgtcgtccaagccggacgatgtcgagtacaccctggacttctttgtcgccgcgctgcgtgagcagttgctggcactggagctgccgcgctgcgtgctggtgggcaattcgcttggcggcgccatcgcgctgaagtacgcgctggatttcccggagcatgtcagccgcctggtgatgatggcgcccggcggcgtggaagaacgggaaacttatttccagatggagggcatccagcgcatggtgtcgctgtttaccggcggccacatgaacccggacaccatgcggcagctgctgcaactgctggtgcacgacgccagcctggtcaccgacgcgctggtcgatgagcgcatggcggtgtgccgcgagcagccgcgcgaggtgctggccaccatgaaggtgcccaacctgaccgagcggctgggcgagatccgctgcccggtgcttggcttctggggcacggaagaccagttcaatcccgcctcgggcgccaccagattcctggccggctgcgccgacgcgcgcttcgtcatgatcaaccgctgcggccactgggtgatggtcgagcacgccgcatatttcaaccgtgaatgtatcggcttcctggcggataccgcccagggcggggcggcataattggctcgcacgtccacacaagaagacccaggagacatcatggaatacccgtatagcctgttcgacctgcgcggcaaggttgccgccatcaccggtgccgcgcgcggcatcggcgcggaaaccgcccgcgtgctggcggcggccggcgcgaaggtcgcggtactagacgtgctggaagccgacggcaaggccaccgcggaagcgatatgcgccgaaggcggcgaggccgagttctggaagctcgacgtcaccagcgaaagcgacgtgaagcgcgtgttcgcggagatcgcggcgcgcttcggcggcctcggcatcctggtgaacaacgccggcatcgaagggcccaatgcgccgacccatgagctcgcgctggagcaatggcagcaggtcatggccgtgaacgtgaccggcaccttcctgtgcaccaagcacgccatcggtcacatggagcgcgccggcggcggcgccattgtcaacgtgtcgtcgatgtacggcatcgccggcgggccggacgtgccgccttatcacgcatccaaggccgcggtgcggatgatggccaagaccgatgccatgctctatgccggcaaggggattcgcgccaactcgatccatcccggctatatccgcacgccgatgctcgaacacgtggcccaggcctcggggcagggcgaggcgctgtttgactacctgggtggacagacccccgcgggcaaggtgggccagccccgcgacatcgccgcgggcatcctgtacctcgtgtccgacgccgggcgctacgtcaccggcgccgagctggtgatcgacggcggctacaccgcacgctagaaccaccagacaaggagaaccccatgcccgatagcgccgcgatgaaagccacgctgctcgcctatgtcgatcgtttcaatgccggtgacgcgcagggcgttgccgcgctctacgccgacgatgccaccgtcgaagacccggtcggcgcgcagccgatcgccggcaagccggccatcctggccttctaccagcacaccaccgcactgggcgcgcgcctggaggtggtggcgccgccgcgcggctcgcacggtgacgccgccgcgctgacctttgccgtgcatgcccgcctggaagggcggccggcccgcatcgacgtgaccgacatcatgacgttcggcgcagatggccgcatccgcagcatgcgcgcccactgggggccggacgacgtgcatttcctgtaggcccgccgcgcccatggcccgccacacccgcgaagatgccgccgtcacgcggacgcgcatcctggccagcgcgctgcaactgatccggcaccgcggcctgcattgcgtcaccgtggacgatgtggcccgcgccatcggcatgacgcgcggggccgtctacgggcatttccgttcccgcgccgagttgctcggcgcgctgctgtcgtgcgccgaagccgacttcgccgcccgcctcgcgccgctggcgcaaggccgcgccgccaacgggccaggcacgctggagcaggcgctggccgccttgctcgatggcgatgacctggcgcgccatgtcagcctgctggccgccctgctgcagcacaagtgcggcgacgactgcgagctttgcccgctgcgcgcccgcgtgctggcgggcgtcgagaccctgcgcgcaaccttcgccggcctgctgccggccccaggcatggccggcctgctggtggcgcacctgtggggcctgctgagcgcgcacgccatgcatctcgcgccgtctggcctgtccggctgtgccgcagcgctggcccggctgtatcaagggcccgacgtgccgccgcatccggccctgtccaccatcccttcctgtcgacccgacgccactttcgatccggcgctgctgcgggataccccttagtctgctcggacgaagcgtttcgggccggcgctgactacgatgctttcaaaagcatggaaacccagtaagggtgcggaggagacagcatgaagcggctcggatttcgttgggcggcgggcctggccggggccggcgccgcgatgggcgcggcctgggcgattgccgtgggcggcgaccttgccaccgcgcatggcagccaggacgagatgcccgctgtcagcgtggcctccgccgacgcggcgcaagaccactgcaacgacgcctgcgtgcgcagccgcggcaccgcggcgttggtggtgctaagccagagacctccgcattgacccgtcgatcgacctgcctatgcaggtcgatcgacgggccagtccctaatagccgaaacagcgatctgcaacctcagtcgatcaggaagcgctgcgtcagcagcgcccaataggccgcgccgatggtgacgttgtcgtcgttgaagtcgtagccggggttgtgcaccatgcaggcgcctgcgctgtctccatcgccgttgccgatcagcagatagctgccggggcagcgctccagcatgaaggcgaagtcctcgctgccgggcagcgccgggccttgcggcacgaccttgtccggcccaagcaaggcgagcgccgtctggcgcgcgaattccgtctcttccggagtgttgacgagcaccgcatagccttgccggtaatcgatctcggcgcgcacgccgtagctttccgcctgggcctgcaccagcgccttgatgcgccgctccagggtggcacgcacgtcgcggtcgagcgcccgcacgctgatttccagcgtggcttcctgcgggatcacgttgttggccttgccggcatgcatggcgccgaccgtcaccaccgccatctgcagcgggtcgacgttgcgcgagaccacggtctgcagggccagcacgatgccggcggcggccaccagcggatcggctgcccggtgcggcagcgcgccgtggccgcccacgcctctgaccgtgacggtggcgtagtccgacgaagccatggtgggaccgtcgcgcagcaccagccgtccctgcgtgatgccaggcatattgtgcatggcgaagacggcgtcgcagggatacttctcgaacagcccgtcctggatcatgcgcacggcgccgcccatgccttcctcggccggctggaaaatcaggtttagcgtgccggagaactgcgcttcctgcgccaggtattccgcggcgcaaagcagcatggcggtgtgcccatcgtgcccgcaggcatgcatgacgccggcatggctgctggagtagggcaggccggtcgcctcgccgatcggcagggcgtccatgtcggcgcgcaggccgagccggcgcgtgccgctgccgcgccgcagcctgcccaccacgccggtgccgcccagcccgcgctccacgtcgtagccccattgggcgaggcgctcggccacggcgtcgctggtgcggtgctcctggaagccaagttccggatgctggtgaatgtcgcggcgcagcgcaacgaacttgtccgcgcgggagcgcagcgattccaggatggcgtgcatgggatttctctcctctctatatgcgatggcattggcgttgcgtcattgcggctgcagcccgatggccttggccaggccgcggtagcgcgccgtctcgccttcgtagaagcgggccgcctcctgcagcgtcatcggcgtggccacggtctgcatctgggcttccagcccggcgcgcacggcgggatccttgaggacattgccgagcgccaggttcaggcgctgcaccacctcgggcggggttcccttcttcaccatgaagccggtccagatcgtgaaggcgaagttcttcagcagcttgccttcgccgatggtgggcacattgggcaacagcggcgcccgggtggcgcccgcggtggcgagcagtttcagccgtccctgctgggccatcgcgccgagcgcggcgttgaacggcacgatggcgaagtcgagctggccgccgccgaggtcctgtaccagcggcgccgcgcccttgtaagggacgtgggtcatcctggtgccggtgagttgctgcatatgctcgaccaggatgtggtacagcgagcccactcccacgctgccgtaggacagcggcttgtccttgcggctgcgcgccagggcgatcagttcgtccgcggagttggcttccaggtccttgcgtgcgatcagtgccagcaccgcggtggaaatcggctgcaccagctggaagtcctccgcctgcagcttgaccgcggcattggccagcggagacaggatcacttcgttgggagagccctggaacaggtagtagccgtcgcccggcgccgacagcaccttctgcgcggcgatggcgccgctgacgccgcccaggttctccaccagcacggtctggccgagctgcttgccgacgggctggctcagcacgcgggcgatggcgtcggaggcgccgccggcgggatagggcaccatcagtgcgatcggcttggcgggataggacgccccggtcgcccccgcggctgcggtcgcgccggccgcgccggcgcagatcgggctggccagcacggcggcaagcaggccgccagtcagcctcgtcagcgggcggcgcaggcattgtgtgagggtcatcgtcgtctcctgatcatggatgccgcgtctgtcttgttgccccggcgggacgcacggctggcagccatgttaggaaggcggcaacctgatgtccaatgcatcatttttctcattatcattacaagattgcatgcgaggacggcgatgaacctgattcagctcaagcacctgatcgcgctggcggagaccggctcgttcagccaggctgccgcgcggctgcatctgacgcagccggcactcagccgcagcatccaggccctggaagcggagctgggcatgccactggtagaccgcatcggcaagcgcaacgaactgacgccgttcgggcagctggcgctggaaagggcacggcgcatcgtcttcgaggctggcgagctcaggcagagcgcgctggcgttgcaggccggccaggcgggcacgctgcgcatcggcctgggatccgggccgggcgctatgctgatgacgccgctgctggtgcatatggccaggcaccatcccagggtcaggctgaccatttcgcgcggcgcgaccaatctgcagcttcagcagctacgcgcccgcgcgcttgacggcgtggtcatcgatctgcgctcgctagtgccgggccccgacctgcgcgtggagcggctgccggacctgcgcgccggcttcatgtgccgcagcggccatccgttgtgcaagctgcgccgcgtgagcttcgacgatctgctggcctatccgatcgcttccagccccctgtcggacgaggtggcgcgcatcctgatcgcccacttcgggccacgcgcgcatcccgaccagatggtcacgctgcgctgcgaggagatctccagcctggtggaagccgcccgcatcaccgatgcggtgttcctcggcatcatcgccgccgcgcgcgagcccatggcaagcggggaactggtggagctggcattgacgccgcccttgcacaccagcgcgcagttcgcgctgatcaccttgcagggacggaccgagacgcccgcaatggagatgctgcgggcattcatggcggagaggatgcgggagtagcggcgctcccgcccgcgcgtacaggcaatgactgctcagcgcaggccagcctgccgttgcgcattcagcgcttccgcgcgcgccttgacgtcccgtgccacctggtcgaagccctgcttcacccaggcaccgtgctcgcgcatgatggtctccgcgttcagccccaggaacaggtcagtggtgaagtagcgggtgcgcccgggcccgacggcttccaggtactggtcgcgccgggctgcatccttgttctcgtcggtggggcgctgctcccacgagagcaggcgttccggctcccacgccaccaggtactcgttgaccgggatgacctggtcggtgccggggatgcgcacctgcatgtacaccatgtcgccgagccggccggtggtctccagctccgggcagaacgtattccattccgcgtagcgcgcaaagtcggtcagcacttcccacaccagcgctaccggtgcgtcgatctccacctggatcgacgtcacgagattctctgctttggccatcggcccctccttcatgaaagtcatcgggaagggacacactagagccgtgtgacttcggttcgcataccccgaacggacgagtccgggtggacgaaggcgatgttgtcgaggtcaggcagattgaggcttgccccgagcgcgcgcggtccggcggcggcgacgcgcggcggggtctcagtctccaactgctgtgagcttggtgccggccatcggggatggctggcattttttttggttcatcgtcaaactctggggtcgggccgcgcgcagggcccacacacttcaggagaacccatgtttgaccacgtcaaattcggagtcagcgactatgcagcgagcaaggcgttcttcctcaaggcactcgaaccgctcggcgtagcggttgcctcggaggggccgccggcgtacggtgtcgagctttgcccaaagggcaaggcttcattgtgcctgttccagaccgaggaaaagccggcgcatcttcacctggcgttcacggccgagaatcgccggcaagtcgaagctttctatcgcgcggccctggaggcgggtggcaaagacaatggtgcgcctggcctgcgcccgcactaccacgccaactactatgcggcgttcgtgattggtccggacgggcacaacatcgaagtggtttgccaccaacccgaggcctgaccctgccatcgaggacgattatttcccctcggggtattccagcttcggataccaatccgccccccggccttccggcgtggtgtccagcagggtccacagcggatccaggtccggcgcaccgcgcgggtcctgacccgggtcgaccgagagggcatacatctcgctgctccagaaatggcggatcttgccgtcccggcgcgtaaacaccgagtagcccggagcgtcggcatcttcggggctgacatagtcgcgggtgaaatcgccgtcgacgtccgcatagaccttcagcttggtccagccccgcgccttcttggcggcgaccaggcgatcgatgggcgagcgggcgatcatcgccagcgccacgcgctgctcgatgtccgggaccttgtgatcccacgacgccatcaccgacgtgcacatcgggcaaggctgctcccgctgcggtccgaacatatagctgtagatgaccagggtgtccttgtcgccgaacagttcggccagcgtgaccggaccgcgttcgccctggaaggtatagcgctttgtcacctcgccgcccgcgggcaggccgcggcgctgttcggccacgcgctcaatgtggcgccgcagctcgatctcctccgcgagcagcgcattgcgcgccttgcggtactccgcgctttcattgggaaaccggacggggttttgttgcgccaactcggttgagggaatgagttttgcagtggtgttcatgtgggtcctcctgccatagctaccgcgaatggccggggaatgtgatgccgtcgcgcagcgtcggcgtttccgcggcccctcacgtagttcgtgtcagcccaggccgaaatgttccacgccatgcagggccgatgctgccgtgacgtggccattgcctttccatttgagaaaggaaggtggagaaagccgcgattccagctgggcctgcctcccctcatcatgtctgtggcgcaataacgcggcagatgcctgccgcccttcgaccgcagcccgtccctacgcgccagtgtgacaagccgtgcctcacatcggcacgctgcggggggcccgcaacctggatgtcatggcaatgaagatcgtattcctggaccgttccaccatctcgccgcaggtcacgctgccagcgctgccgttcccgcatgagctccaactctacggggaaacgcctgacgaggacgtcgccgcgcgcatcgccgccgcggacgtggtcatcaccaacaaggtgaagctggatgcccgccagcttgagcaggcaccgaacctgaagctcatcgccattgcggcgaccggcaccgatgttgtcgacctgcaagcctgtgccgcccgcggcatcgtcgtctccaatatccgcaactatgccgtccatacggtgccggaacatacatttgccctgatcgtcgcgctgcggcgaagcctggccgcctaccacgatgcggtccggcgcggccgctggcaggaatccggatccttctgcttcttcgactacccgatcaaggacttgcacgggtcggtgcttggcatcatcggcgacggcgtgctcggccagtcggtggccaggatggcgagtgcgctgggcatgcagccgctgtttgcggcccacaagggacgcgagggcatgggcccgctctacacgcctttcgacgaggtgctgcgccgtagcgacatcatcaccttgcattgcccgctggtggcgcagacacgcaacctgatcgacaccgcggagttctcgaagatggagcggcgcccgttgctgatcaacaccgcccgaggcgggctggtcaatgaagcggcgctggtggaagcgctgcaatccggaaaggtggccggggccggcttcgacgttgcgacgcaggagccgcccggcgcggaacacccgttccatcagttgaaggatgcgccgaacttcatcctgaccccgcacgttgcatgggccagcgacgaggccgtgcaaggcctggccgaccagcttatcgacaatatctgtgccttcgcgcaaggcgcgcccaggaacgtggtggccgcatgacgtgcccgccggacgaaggatggtgccgacaatgaaagcagcaggactcaaggtgctggttgcacctgactcgttcaaaggcagcctcagcgcgaccgaggtggcggatcgcatccgcgccggcatccggcgcgcggtgcctggtgcggatgtcaccgtggcaccgatcgccgatggcggcgaaggtaccgccgaagtcctggcggccacgcgtgcgggcgtgtgggaagcggtggttgccaccgatgccaatggcgtgccaaggccggtgcggtacttccgcgtccgcacgcaggagtttggcgagctcgcgatcgtcgaggtggctgaaatcgtcggccttccgcacgccctgctggcgccggggcaacgcacgaccaggggcatcggccatgtcatccgcgcgctcgctgagcgcagtgtcgataccatcgcgatcgggctgggcggatcttccaccaatgacgcaggtgccggcctgctggcggaaaccggcttttgctttaccgatgcgcagggcaacgcattgtggccaaccctggatacgctggacgcgatctgcgccgcaacgtatcagcagcctgcgcagcttggccgggtccggctgctgggcctgtccgacgtcaacaatccgctctgcgggccaaacggcgcgacctttgtcttcggcccgcagaagggcgtgcaagacctggccgctgcggatgcccggctggaacggtttgcaacgcgatgcgccgccgtggtcgggctggaggttgccgatgcgcaaggcagcggcgccgccggcggcatcggctttgcgttgcacctgctcggcgccgagatcgttcccggcgcggcctttgtgctgggtgctgccggcctcgatgcagggctcggcgccttcgactgggtcattaccggcgagggacggtccgatgcgcagaccatgatgggaaaaggtcctgccatgatcgcgcgcatggcgcgccaggccggtgtgccggtgacgctgctctcaggcgccgtcgagcccgatgccggactggccgaagccttcgacgggtgcatctcgattcagcaggggccggtatcaatcggctttgcgatggagcatgcggcggcattgcttgaggatgctgcgtgccagcttgcgcgcctgtatgtcgccgccagccggctggaaaatcgcctgggcgtatagaaaaaacgggtctccccacccggggagaccttccacgcatcgacgacacttagtccgcgcgaatattcgatgtcttgaccacacgcgaccaggacgccagttcctgatcgacgaacttgcccagctcctgcggccccatgtaggcggcaaaggcaccttgttcctcgatcttcttcctgtacgtgtcgctggccacgatcttcttcacctcctgggacaagcgctcgacgatggccggcggtgtattcgccggtgcaaacagtgcaaaccaggattccacctcataccctggcagcccagcctccgcggtggtcggcacattgggcatggagggatggcgcttcggtccggcataggcaagcgccttgatcttgcccgcctgcacatgcccgatcacgctcggcggggtcgtgatgaacatgtcgacctgcccgctgatcaggtcggtgaccacgggcccggcgcccttgtacggtacgtgcgtcatcggcaccctggtctgccgcgccagcatctcgccggcgatatgctggatcgagccattgccggacgaggcatagaacaggcccttgccattgcttttgccgtaggtaaccagttcggctatcgatgtcgcgggcagcttgccgttgatggcgatgacgtgcggcgcgcgcatgaccagcgccaccgggacgaagctggacggcttccagcggatctgcgggaacagcgccggattgccgacgtggtagccggaatactgaagcagcagcgtatagccgtccggcgcggcgcgcgccacggcttcggtgccgatattgccgctggcaccgggcttgttgtccaccaccacgggctggccaagcgcggcctgcagttgttcgccgaccaggcgggcaacgatatcggtggatccggccggtgcgctgggcaccaccagggtgaccggcttggtgggataggcgttggtgctgtgggccggggcggccgcagccagggccgccagggcggccgcggcgatcgtcatgcgtttcatgggtgtctcctccatcgttttgccgggttggccgatcttcagtcgaccagttctgatatctcgatcaggttcaggtccggatcgcgcacgtagaccgagcggatcttctgcgttgcgccggtgcgcgccaccggtccttcgacaatgggccactggcatcgccgaagatgggcgatgacgtcgtcgagcgggacggaagcgataaagcagagatcgagtgcgccgggaacgggcaggtgtgccttgggctcgaactcggcgccgcgctggtggagattgatcttctggttgccgaagcggaaggccaggcgaccgttgccgaaggtttcaggctgcatctgcatgacttcggtgtagaagtgccgcgtggcttcgaggtcaacacaggtgagcaccagatggtcaagatggtcgatcagggacatgatggtttccgggtgggtgtcagggctggaaggcccgttgttcggggatcgcgtcggcggcaggcatcggatgcaggtcgaggcggcggccggccttcagcagctggcttgggacgtcatggccgatcaggccaggcaagcgcgcggcggcatccaggatggcagccaggtcgacgccggtgtcgtagccgtccagttcaagcatatggacgagttcttcggtgcagacattgccggtcgcgcccggcgcatacgggcagccaccgaggccgcccagcgaagcgtcgaagcggtcgatgccctggtccagcgcggcgagcgcattggccagcgccaggccccgggtattgtggaaatgcagggtcagcgccaggccggggaactgccgccgcgcggcttggcacagcctcgcgacctgggacgggaacgccatgccagtggtgtcgcacagcgtcacgccgtgagcccccaggtcggcgaagcgctgcatccagcccagcacgttttccagcggcacgtcgccttccatcgggcaacccatcgcggtcgacagcgagatgttgatcgcggtcggcgtctccctcaccacgcggatgacgtcggcaagctgggcaaacgattgctcgcgcgacatgcgcaggttggtgcggttgtggctttcgctgaccgacatcaccaggttgacctcgtcgacctggcaggagagggcccgctcggcgccgcgcacattcggcaccagcaccgtgtagaccacaccggggcgccgcgcgatgcgatgcatcaccgcttccgcgtcgcgcagcgcgggaatcgccttgggcgaggtgaaggaagtcacctcgatcctggcgtagccgcatgcgctcagcgcgtcgatcagggcaaccttgtcatcggtctcgacaaagcgggcctcgttctggaagccgtctcgcgtggcgacttcatgtatgtacaccttcctggcagtcatgccggtctccttgtcagataatccctgccatgcgccatgcctcgcgctgtgccgtgccgatgccaaggccttccagcaccgcgtcggtatgctggccaagcgcgggggcggggttgggcagtgcgccgggggtggcgctcagcttcggcacgatgccgggcaactggacgggggtgccgtccggcaattgcgcgtccaggatcatgtcgcgcgcacggtagtgcggatcgctggcgatatcggcgacgtcatagatcttgcccgcggggatgcgggcgccattgagcgcgtcgagtgccgcttccaggctgcgctgtgccgcccattcgccaatggcggcgtcgagcatcgcgacctggctgacccggccgtcgttgtgggccagcgcagggtcgtcgcgcaggtcggggcgctcgatcatgtccatcagccgcctgaagatgccatcgccattgccagcgatcagcacatacttgccgtcggcgcagcggtacgcattggtcggcgcgatgccgggaagactgctgccggccgcctgccgcacggcgccgaacaccgagtattccggcagcaggctctccatcatgctgaacaccgactcgtacaaggccacatccacgacctggccctggccgccgttctgctcccggtgccgcaacgccagcaggatgccgatcacaccgtgcagcgcggacagggagtcccccatcgatacccccacgcgcaccggggtgcggcccggctcgccgctcaggtggcgcaagccgcccatcgcttcgccaatgacgccgaagcccggccggtcgcgataggggccggtctggccatagccggacacgcgcagcatcaccagcccgggattggccgcgcacaggctgtcccagcccaggccccagccttccagcgtgcccgggcggaagttctcgatcagcacgtcgctttgcgcggccagcttgcgcacgacttcctggccttgcggcgtgcgcaggtccagcgtgaccgactgcttgtcgcgggactgtgcctcccaccagaccgaggtgccttcatgcaacagccgccacttgcgcagcggatcgcccgtgcccggcggctcgaccttgatcacttccgcgccgaacgccgccagcatgcgcgcggcaaacggccccgcgatcagctgccccagttccaggacgcgtacgccggcaaggggctttgacttgcttgtttccatctccaggctcctgctgtgtgctggagatagtgggtcaaaagccgttgcctggtaatcgatggattctcaaccgtcctttccttacgggaaaaggtggtgcatattgccgtacgggagcaccacggccggcacaacccgccactttgtcggctatcccaggcggatcaaggcctgcattgcgctgccgggagccgggcgcgccgtttgacaaggcgcgagcggcttactagcctttcctggctttcaatccagtcggcgcgcgtcgccagtgcaataccatgatcaatcctgcccatttcgatctccagtccctgcgcgtcttccagctggtggcccaatgcggcgggctgacgcaggcggcgaacaagtcacacatgacgctgtcggccctgagcaaacggatcgcggatcttgagcgcacggtgggatgcgcgctgttcctgcgggttcggcgcgggcttgagctgacccccgctggccatgagctggtccagcatgcgcgcatggtgctcgacaaggtcaaccagatggcgggcgagatgagcgacttcgccaccggcgtgcgcggacacgtcaaggtctgggccaatacgtcagccgtgatccagttccttccgcacgacctggcaagcttcctggcctcgcagccgatgatcaggatcagcctggaggagcgcctgagccaggacgtggtggtagcgctgctgtccggtgaaaccgatatcggcgtgttcgccgacaacgtgccggcttatgacatcaggaagtctgtctatcggcgtgaccgcctggtcgtcctggtgcctgccgggcatccgctggccgggcgcccggaagtgagtttcgacgaaaccctggagtacgactttgtcggcctcaaccagggcagctcgctgctgcagcgcctgaccgacgccgcatcggcactggacaaggtggtgcggctgaggatccaggtcagcagcttcgatgcgatctgccggatgatcgaggccggcctgggcatcggcgtcctgccagatggcgcggtccggcccgaactgctgggtgccgggctgcatgccgtctacctgtccgacgcctgggcctcacgcattctctggctgggcgtgagggacgaagctggtctcttgccggaggcaaggacgctcctggagcatctgcgtgcagcgggctctgccagcgcgagtcgctgatgacacggtagtgccgtcatcagatgtcgaagtagagctggaattcccacgggtgtggccgcaccttcaatgtatcgatctcgcgcgtgcgcttgtaatcaatccaggtcgtgatcaggtcttcagtgaagacatcccccttgcgcaggaacgctgaatcggcttccagcgcgcaaagcgactcttccagggagcctggtacctgccggatgcgggcggcttcctccggtggcagatcatagatgttcttgtcgagcgggtcgccggggtccgtctggttttcaatgccgtccaggccggcgagcagcattgccgagaaggcgaggtaggcattggccgacggatcaggacagcgaaattcaacgcgcctggcgctcggggaatccgaaaccattggaatccgggccgcggcggaccggttgcgctgcgacatggccagattgacaggcgcctcgtatccgggcaccagccgcttgtaggagttcgtgctcggtgcgcagaatgccatcagcgcgggggcgtggctgagcaagccgcctatataccaacggcacatctgggacgtctgcgcccaaccgttcttgtcatagaagaggttctcggcgtcgcgccagaggctctggtggcaatgcatgccgctcgcgttgtcggcaaacagcggcttgggcatgaaggtggcgaccttgccgtggcggcgcgcaacgttcttgcagatgtacttgtacatcatcacgttgtctgccatgcgcatcagtggcgcaaagcgcatgtcgatttcattctggccggccgtggcgacctcatggtgatgcacttcgacctggatgccggcctgcatcagcgcgagcacgatttcggagcggatgtcctgcagcgtgtcgcttggcggcacgggaaagtacccgcccttgtagcgctgtttgtagccgagattgcccccgccataggcgccttcgtcacggcccgaggtccattcgccttcggcggattcgacatggtagtagccagagtgctggtcctgcccgaagcgtatggagtcgaaaataaagaattccagttcggggccaaggtagcaaaccgtggcaagaccggtttgccggaggtacagctcggccttgcgtgcgatatggcgcggatcgcgcgagtacggctggtgcaggacagggtccagcacgtcgcagatcagcgccagcgttggtgctgcgcaatacggatcgatgaacgccgtggccgggtcaggcctgaccagcatgtcggactcgtggatttcctggaacccgcgaatggaagacccgtcgaagccgatgccgacagagaataagtcgtcgttgacttccggcagcgtgatcgagaagtgctgccacacgccgggcaagtcggtgaacctgaggtcaaccacctggatcgcgtgcgtccggatcagatcgatgacctcgccggggttttgcggcggtacaacgtgatagctgccgggttctattgagaccatgcccatatccgcctccatcgtctgcccgcagcctagtccaagattagtctgtcggattccgaatggaaagtgccttaccaacgacgctgttgtggcatccttccatttccaagaagaaaaagaagggtaggggtcaacatgtataagggcttgctggtagttgcggccgccgcggccgccttcatctattacaaaacgcacgcgcctttggcaaatcccgttgcccaggccgagccacagcagatcgaggctccagcagtggcagccacggcggaaccggcattccgctgcgagggcaaacagcactgcagccagatggcatcctgcgcggaagcgcgcttctatctgaaaaactgcccggcggtaaagatggatggggacggcgacggtattccatgtgagacgccgcccctccagtgcatgttttgacgtgccgcttgctgtccgacaccggaaccacgcaatgcgtcatgtgaccgaccggcacgggccgccacgaagtcaatggctcagcttgcccgatcatcgatcacctgctgcagcgcctgcacgaattgcctgactgctggcgtcgctacctcctcgtcgaacgcgaattccacgtcgaagcggtcagcgacctcaggcagtggcaccagccgcacggtcggcggacagacggttgacaggcttgcggggacaaacgcgcaacccatccccgccgaaaccagaccgagcacggtcgggatgtcgctgcccacctgggccacgcgaggcgagaagccggcgcgctcacactgcgtcatcaggaagcgatgctgggacgaggaccgcgccggatcgaaccagacgaagggcagatccgccacgtccgccagtcgtttcggctgcttgtggcgggcggtctgcgatgaaggcatggccaatacgaagcggtcgctgagcaacacgatgccagtcagatgcggcgcctcatgccgacgccaggccatgatgccgccatccacctgcctgttccggatcgcggcaatctgctccgtcgacagcatcgggtccaccaggaccttgacttccgggcacgctatccggaaggcccggagcacctccgtcacgacggctgaactcaggtagttcggcaacacaccaaggcgcagctcgccgagctgcccggcggcgcaacgcagggcgcgatcgcggctggcttgcaggtttgccagaagttgtgtggcatccctcaggaagctctcgcccgccacggtgagttgcacgccccttgccttgcgcgccagcagtggcgtaccgatggccgcctcaagttcgatgatttgccgcgacagggctggctggacaatgccgacggcacgggcgcccgccaccacgctgccggcctgcgctaccgcgatgaagtagcgaagatgccgcaattcaatgttccgcataccgtttccgcccattcatttccatactcatgaagcatagctaggctacctaaataacattggtttgcatagcttcctgcgactacgatggcgcagcttcccgcgttgcggggacggctcgctttccacatttcgctaccaaacatgacgcttcacatcagcacaccttttgtacagtcccagcccaattcgcggcggctcggcaaaccggtctggctaaagatggaagccgcacagccgtccgggtctttcaagcttcggggtgtcggagccttgtgtgaagcgcggcacgccgcgggcgtacagcgattcgttgcatcttcaggcggaaatgccgggcttgcggcagcctattgcggacgcgaactcggcgttcccgtggtggtggtggtaccggagagcacaccatcgcgagcgcgcgacctgatccgcctggagggctcggagttgatcgtgcgcggaggcacatgggcggaagcgcacgagtttgcactgtccctgatcgggccacgcgatgccttcgtgcacccgttcgacgatccgctcatctggcaggggcacgccacgctggtggacgagatcgcggcatccgggccgaagccaggcgccatcgttcttgccgtgggcggtggtggcctgctgtgcggcgtgctggaggggcttcagcggaatggctggtccgacgtgcctgtgatcgcggtagaaaccgacggtgcggactgctacgcccgctcggttgccgaaggcaggccggtcgaactcgcacagatcaccagcgtggcgacgtcgcttggcgccaggcggccgtgtgatggcgcgctccgatgggcgcagcgtcacgagatccacagcgtcgttgtgtcagacaaacaggcggtggaggcagcgataaggcttcttgacgaacaccgcgtcctggttgagccggcatgcggcgcagccttggcggcattggattgcgacaccccggtgctgcaggcggcgtccagcattgccgtggtggtatgtggcggggccacggtgacggcacagcaactgcttgactttgctgcaaggctggactgagcgggcttaaggtagcaatttggtaagctcggctacccgccggcgagattcgcccgaattacctggttccggggatgcccctcacggccgatttctgtcagcctggcgtgatccggagatcggccagttccggtggtacagctaaactctggccgtgaccgcaccgtacccaatgagccaaccattgactgacaccggcgaatcggtgttgcccgctcccttgctggtcgtcgaggacgagccactgatgcagaccaggctacgcacgatcctggccacgctcggctatgccgaggaggccttgtggtttgccggcagcctcgccgacgccaatgcgctgctaaccgcccagccatttgcgatggtgctggttgacgtcgggttgcccgacggcaatggcatcgacctcattcgcgcgttgcacgagcgcgatcctgccttgccaactctggtaatctcgacctggaacacggagcgcgtcatcgtgagcgcgctgcaggcgggtgccaccggttacctgctcaaggagcgcgacgacctcgagatttccttgtcgatccgcagtgcgctgcgcggcggagcgccgatcgatcctttcgttgccaggcacatcctcgatctggtcgccacgacggcaccattgccaggcggggcgcaaattcatgcgcgccgattggtcggcgcgtcgccgctgagcgcacgggaaatcgaaatcctctcgctggtcggcaagggcctgaccaatcgggagatcgcggatttgctgtccttgtccagactgacggtcgaatgccacatcaggaacatatacaagaagttggccgtccactcccgcacgcaggccgttttcgaagcgcgtgcgcatggcttgttgcgctgatcttgggcgccacgctcctcgccggcgctgcaaacgcgcaggaagggccgggcgccaccgcctttacccgcatagaggctgcccgatcgacctggcagggtgatagcccgccggcggcgggctgggtcccagtgaagctgccggacgactggtcctcgcgctggcccgatttcgacggcgtggtctggtaccggctgagctggcagtgcgcagatgcaagccaacccacggcgctgatgctcgcttacctgaatatggcgggggcggtttatctcaacggcagcttgctgatgcgtgacgcgagcctcgtcgaaccgctcacgcgagcctggaatactccccgttatcagttgatatctccgccgttgctgcgggagggcaccaacacgctgctgattcgcgtctcggggctgtcggcataccaacccggccttggaccagtatcggtcgccgacccggaccgcctgcgggccgcttacgaacaggcctaccggctgcgtcatgacctgcagttggtcagccttgcaatcaccgtcgcgctaggttgcttcttcttttcgctctgggtgatgcgccggcaagaagtgacctacggatggttcagcctgatgtcgctggcctggtggtgggtggcgctgaatcaggtggcgacgagcacctggccgtttgccagtaccgatgcctgggggcgcgcaaatatcatcgcgctgctcatctacagtgctgccttcacgatgtccatggtgcgcttctgcgaacggcgcctgccgcgcatcgaagcggtgctctggacgctggtagtgttgggcgccgccgtcatgctcggggcgccgcacggttacctgaccgacgtgcgcaacacgctgacggtgggactggcgtgcaatttcttcgcgacgtgcctcgtatttctctgctttgccgggcgcagtggtcgcaccgaccatcgcatcctctcgttttgcattgcaattttccttgtcgccgcggtacacgacctgctgagctttcttggcatcctcaaggacaacctctactacgcggccctcacttcgcagttccagatgatcgccatggcgctggtgctggcctggcgcttcgtcgccaacctgcgccgcattgaacgattcaatgacgaactgcactgcaagatcgacgcggccaaggcggagctcgcagccaacctggatcgccagcgcgagttcgaagtcgccaatgcgcggctcagtgaacggctcaatctcgcacacgacctgcacgacgggctcggcggcacgctcgtcagcggaattgcgacactggagcgcatccctcacgacatcccgccaggccaggtcctgtcgatcctcaaggagctgcgcgacgacctgcgcatcatcatcgataccacctccagccagcagtttggcgagcacgcgctggcaggtcagatcgtgccgctgcggcaccgtcttacgcggctgttcgagagccacgacatcgagtgccggtggcagctcactggcctcgatcaatgctatctgccgacttcgcaaattcttgatgtcatgaggaccttgcaagaggcgctgaccaatgtgctgaagcacagcaaggcgagtcgcgcggacgtcgtcctgcgcaatgatgcccgggggctggagctggttgtcagcgacaacggaatgggcttcgaacccgccgccatcgaacggcatccgggcaccggcatgcgcagcatgcgcgcgcgtacccggcgtcttggcgggacgctcagcgtgcgatccacaggggaggggacaatgctgaccgtgcgtatcccaatcgcggccgacacccttggatcaccacttgacctgcagcccggccgatccagtgatcgagttcctgaccctggcattaccccccgtggcccaaagcctgccggcttcgccatagagactgatcctccggttcagggccaaggttaggccgccggcgagacgaacatagtcaatgttgaacgggctgcggatgcattcgaaccctcgaagccgggtgcaggtcgttcgctgacgatcccacggccaacttccgtagacgacccagaacggccaaccgattggtcgtggtagagtcgaccatcatttcttatcgtgtagccttatgtcgccacccgttgagattccggcaattgttcccgcgcaaaccgcgctggtggtcatgcattatcagaccgacatcctggcgctatttccctcggtcgcgcccactctgctctccaacacgcgcaagctgtgtgacgccgcgcgggccaggggcgtcagcgtttattttgccaagatccactttgctccaggctatccggaagtcagtccgttgaaccggaacgggcagggaatcaagcagcttggtcttttcgtcgacgaccagatctcgccggaactcggccagcaggccaccgagccgctgatcatcgcgcatcgcgccagcgtgttctttggtactgacctgcaggtacggctttccgcgcagggtatcgataccctgctcatggtgggcattgcttcgaccggtgtggtgctgtcgtcggtcgcctatgcgagcgatgcggacttccggctattcacggtcaaggattgctgctacgacccggatcaggtcgtgcacgaccatctcttttcaacggcgttcgattcgcgcacaacggtgctttcgctcgctgatgccttgcgcttgcttgcctagcatttcgacctgccaggagtgccgccgcgccatctctcaggcagacgggaagagcagatgatcggtcaggttgcccttcagatcgagcatcgaataattccggcggctgaagcgccagcgtccgtcgaccttttcgaaggcgtcatgatagcgaccggccgcgatcacctgcagcgcgattcggtcggatgcctgaaggaccgtgtagtacgatctgacggtagctgtcagcttgcccgaagcaatctcaatgatcggattgctgatgacatgccgggttctgggcgttccatccgcatgcaatttcacataggcttgccagagcttgagcatggcctcggaacctcgcagcactgcatctccggtgtcgatctctgcatgctcgaacagtgcggcgaccccaggcagatcgccggcgtccatgcgctcggcatagatgtagaggagattggcaagctgcacggcatcctcggtcatcgactcgtctccggtggtttgcgaggattaaagcagtccggcgctactccggcatcgtccgcttggagtacgaagcccttaccccatccccaccacactggacagcaacatcttcaccagcagcgcctgccgcgtcgccccggtcttggcaaagatgccccgcaggtgcgcccgtgccgtgttcttcttgatgccgagccgcatcgcggcttcgtccagcgtcagcccgtcgaccatcagcaaagccagttcgatctcggtcggggtcaggtggaacagcttgcgcaggttggcgtgggtgttgcgcggcgatcccgccgggtcgcggatgaacaccgccaccgcgggtcggcgcgacttgtcttcgctgcgatagctgagcgggatcggccgcaccagcacgctcaggggcgtgggcgcggcgggccggctcagcgtggtgacttcgctgcgcggtgcggccagcgcgtgggcctgggccgcgccttccaggatcttgcggaacctgcggttttccaccgggcagtgcgcgtgcagcgcgccgtctgacaggtagaggccgtcgcgcgcctgcagcaggcggccggcgacgtcgttggtccggatggtcctgccgtgttcgtccaggatcaccgtgccgacctgcagccggtcgacggcatccgcgtacagggaccgttcggatgcaagcacgtcgagcgcggcatgcaggtccactgcgcgcttcaggtgcggcagcaggccgtgcagcagtgccttgtcggcctcgccgaagtcctgtcccgcgtggacgcggctgatgaacagcgcgcattccacgccgtcgggcgtgaccaggttggccgccaggatatagcgcaggcccagcggttgaaggtattgcgtgtagaaggggtgtgccagccagccggcttcgccaaacagttcgtcggcgctgaagagccggtccgggtgcaggtccaggaaggggcacagcgcgtagtactgctcgctgtacgagggctcgcccggcaggtgcgggccgtagtcggaggcattgacgatcaggcccggccggtcggtggcagggtggcgcagcaccagcgtgacgaaggcggcgcccaggcgctggcgcacgctttccaggaagccggcccagggcatggcttcggtcgggccctggtagagctgggcgagcagggcgctcagctcggcggcgggcaggggggctggcagcatgatggcggtccgtcgggtcgtggcaacagtcaaaagcgcgaatctcgcccctgattgctgacaaaacccgcatgccgcgggtttgctcccctctcccgcttgcgggagaggggccgggggagagggcaggcattggcagtatcgacagcctgcacttcgtcgacacaccggccctctccccaaccctctcccgcaagcgggagagggagcacacaactggtcattcagactcaatggcacttggcaagcttgtcagcactccgagacgcaaatcccgctgttcccatcgtaccgaccccgtccgtcgcctcatcgtccgttcggcctagggcttctcccgcagccacgccacgatccgctccgccgcctgctgcgcggtgtcggcggtagtgtcgatgcggatctcgggccgctcgggcggctggtacggcgaatcgatgccggtgaagttcttcagctcgccgcgccgcgccttgcggtacaggcccttggggtcgcgttgctcggccaccgccagcggcgtgtcaatgaagacttcgacgaaatcgccgtcgccggcgagcgcgcgggccatctcgcgttccgagcggaacggcgagataaaggacaccagcacgatcaggcccgcatcgagcatcagccttgccacttccgccacgcgccggatgttctcgacgcggtcggcctcggcgaagcccaggtccttgttcaggccgtggcgcacgttgtcgccgtcgagcaggtaggtgtggtggcccagcgcgtgcaggcgcttttccaccaggttggcgatggtggacttgcccgcgccggagagcccggtgaaccagacgatgcgcggcgactggtgcttgagcgcggcatgggcgcggcggtccacgtcgatggcctgccagtgcacgttctgcgcccggcgcagcgcaaagtgcagcatgccggcgccgaccgtgttgttgctgagacggtcgatgatgatgaagccgcccagctcgcggttgcgcgcgtagggatcgaaggccaccggctggtccaggtgcaggttgcacacgccgatctcgttcagctccagcgtgcgcgcggccaggtgttcgagcgtgttgacattgaccttgtacttgggctgcgccacggtcacgcccacggtgcgcgtgccgagcttgagcaggtaggggcgcccgggcagcatggcgtcctcgttcatccacaccagcgtggcctcgaactggtcggccactgccggcgggtcttgcgggcaggccagcacgtcgccgcggctgatgtcgatctcgtcctccagcgtcagcgtcaccgcctggccgcgcatggcgtgctcgcacgcgccggcggcgccgacgatgccggccacgcggctctcgcggcccgagggcagcgcgcgcacgcggtcgccacggcggatctcgccggcgctgacggtgccggcaaagccgcggaagtccaggttgggccggttgacccactgcaccggcaaccggaacggttcgccttgcacgggcgcgttgtcgatcggcacgttttccaggtgggccatcagcgtcgggccgtggtaccacggggtattggcgctgggctcggtgatgttgtcgccgcgcagggccgacatcggaatgcaggtgatatcggtcaggccgatctgccgggcgaactcccggtactcgttctcgatgcgcgtatggacctcgcgcgagtagtcgaccatgtccagcttgttgacggccagcaccacacggcgaatgccaagcgtggccaccaggtagctgtggcggcgcgtctgggtctgcacgccgcggcgcgcatccaccagcaggatggccaggtcggcggtggaggccccggtgaccatgttgcgcgtgtactgttcgtgcccgggcgtgtcggcgacgatgaacttgcgcttgtcggtggcgaagaagcggtaggccacgtcgatggtgatgccttgttcgcgctccgcggccaggccgtccaccagcagcgcgaagtcgaggttctcgccctgcgtgcccattttcttcgagtcggcctccagctgggcgagctggtcttcgaacagcatcttggattcatacagcagccggccgatcagcgtgctcttgccgtcgtcgacgctgccgcaggtgataaagcgcagcaggctcttgttttgctgggcgcgcaggtagtgggcgatctcgcccgaggtgccggtggcttgcgcggcgtcctgcgcaagcgcgggcgcggtgtcgatcagggtttccatcagaagtatccctcctgcttctttttttccatcgatccggccgagtcgctgtcgatcagccgtccctggcgctccgaggtggttgccagcagcatttcctggatgatgccgccgagggtgtcggcctcgctctcgatcgcgccggtgagcgggtagcagcccagcgtgcggaagcgcaccttgcgcagctgcggcgtttctccggggcgcagcggcaggcgctcgtcgtcgaccatgatcagcgtgccgtcgcgctccaccaccgggcgctccttggcgtagtagagcggcacgatggggatgtcgttcaggtagatgtattgccagatgtccagctcggtccagttggacagcgggaacacgcgcaggctttcgcccttgcgcttgcgggtgttgtactggcgccagagctcggggcgctgcatcttcgggtcccagcggtgctgggcggtgcgtaccgagaacacgcgctccttggcgcgcgacttttcctcgtcgcggcgcgcgccgccgaaggcggcgtcaaagccgtagtggtccagcgcctgcttcaggccctgggtcttccacacgtcggtatggacggcggagccgtgctcgtgcgggctgatattgcgcgccagcccttcagggttgacatgcacgcgcaggtccaggccaagccgcgcggcggtctggtcgcggaacgcgatcatctcgccgaacttccatgtggtatcgacatgcagcagcgggaacggcggccgcgcgggatggaaggccttcatggcaaggtgcagcatcacggcgctgtccttgccgatggaatagagcatgacggggttttcgcattccgccaccacctcccgcatgatgtggatgctctccgcctccagttgctccaggtgggtcaacatcgggatctcctcttggtttgccggcgccgtgcagggatgtcgcggcggtctggcatgggcacaaggtagcgagccggggcccttcgccacttcgtccgggcggactaagaagtcgcgggacgcggcgcgcatttcctagtccacccggacgaggctggggcggccccgcgctcggtatcgttgcttcgccgacgaaccacgggagcaggcagatggcgaactccgccgaagaacaattgctgagcggccagacctgggccgagttttgcgaggtgctcaagcgcagcgggcagcagatcctgcgcccggaggccccgtcggacgcgctcacgcgcgccgagggcttccgctacctgagccgcctgctgcgcattgcgctggagatgcatgtggaatttgccgatccggcgtttcccggcttcttctcgccgtcgcacgaaaccgccaagatcggcgcggacaatccggacaacctgtaccgatacgcacgcctggacggcagtgccgagtaccgcatccgcggccggcgcggcacggtggcgtacctgagtttcggcacgcagaagggcggctatgaaaccgacgggcgcatggtccagaccggctttctcgacagcaacaagctggcagtggcggccgatggcagtttcgagatcgccctcagcgcgcgccagcacgaaggcaactgggtgcgcatggagccgggcaccaacgcgctggtggtgcggcagacctttatggaccgcaaggccgagaccccggccgaactgcacatcgagcgcctcaatggcagcgacaagccgcccgtgctcgacgctgaacgcctgcatggcggcctgctgcgcgccgctggctttgtcgaggggaccgcgcgcatcttcgccgactgggcccagggctatggcggccatgtcaatgcgctgccgcccgccgaccaggccgtatgccaggcggccggcggcgatcccaacatcttctactaccactcctgctgggcgctggcggacgacgaggcgctggtggtcgaggtggaccgggtgccggcctgcgatttctggaatttccagatcaacaactactggatggagtcgctcgactaccgctaccacgacatctgcctgaacaagcacagtgcccgcctggatgccaacggcggcgtcaccgtcgtcctcagcgcgcgcgatccgggcctgcccaactggctggaagccgcgggccaccgcaacggcaccatgtgctggcgctgggtgggggcggcgcagccggtgcatccgcgcacgcgcgtggtcaagcttgaatcgctcaggaatgaatgccgggagaacgcatgaacaccatcgcatccgaccacaccgcagtgcttgacgtggagcgactgctggcacaggccagcgcacagtccggcggactgactgactttggcccgggcgattaccgcgaggcgctggcggtgctgtccgactcgcttgcgcgcgaagccgggctgtcgccgcagggcgcgcagatgctgcaaggcaagctgcaggcgcaactggtgaaccggctggtgatccaggactactgccggcgctatcccgaaatcctggaagagcgcgtcgacgatccgctggtgatcgtcggcctgccgcgcaccggcaccacgctgctgcagcgcatgctggccacggacgcgcgcttccactcggcggcgtggtgggaaacgcgctacccggcgccgctgcccggcgaggacgtgcgcgatgccggccggcgcatcgggctggcgcgcgaggaggtggcgcagatgatccgctttatcccggacatcctcgccatccatccgctcgacgcgatggcggccgacgaggaattcatgctgatggagcattccttcctgtgcgcgatggattcctacgccaacgtgccgtcctataccgactggctggcgcgccaggaccacacccaggtctatgcctacctgaagaccatgctgcagttcctgcagtggcagaagcggcagcgcggcgagccgccggcgcagcggtgggtgctgaagacgccgcagcacctgcatacgctggaaatcctgttccgggtcttccccggcgcgcaggtcgtgctgacccatcgcgaccccgcccagaccattccgtcgatggccagcatggcgcatacgctgtggaagctgtacgccgacgcgcccgatgccgccacggtggggcggcagtggagcgggcagatgcagcgcgccaccgcccatgccatgacggtgcgcgacgggctgcctgccgattgcttcctcgacgtgcgtttcgaggataccgtgcgcgatcccttcggcgtggcgcaggcggtctaccgctttgccggcatgccgctgaccgagtccgcgcgcgccggcatgtgggcatggatggagggcaacccgcgcaaccagcgcgcggcgcacgcctatacgctggagcagttcggactgagccaggaacaactggaacgcgatttcgccggctaccgcgcacggcacatcctgaagcaaaactaagactgcgcactgcgcatcacaggagacaacaccatgctgttgaaagacaaggtcgtcatcgtgtcgggaatcggtcccgggctgggcgtcaagctggccgttgaggcggcgcgcgaaggcgcccgcgccgttgccatcgccgcgcgcaccgcggcgaagctggacgacgcccaagcccgcatcgatgcactaggcgccgactgcgaagtgctcaaggtggtgaccgacatcaccgaccgggcccagtcccggcacctggccggcgagaccatgcgccgcttcggccgcatcgatgcgctggtcaacagcgccttccagcatggcaacttccccgagccggtggaagcggccgacctggatgtctggcgccaggtgttcgacactaacgtgttcggcaccatgacgctgacgcaggaagtggcggcgctgatgaagccgcagggcggcggcgccattgtcatgatcaacacccaggccacgcgcaagccgatgcccggcgaatccggctacgcgacgtccaagggcgcgctggcggtggcggtcaagtacctggcgcgcgaactgggcccgcatggcatccgcgccaacagcatcttcatgggctggatgtggggcgagccggtgcagggctatgtgcgccacgccgcggccgagcagggcgtgagcgaggacaccgtgatcgcgccggtgaccgcgcagattgcgctgggccgcatgccgaccgacgacgactgcgcgcgcgctgcgctgtttctcgtgtcagactacgctagggccatcaccggcgcttcgctcgatgccaacggcggcgatttcatgccctgagtcctgaccacaccaatgacacgctactttgccttcaacggcgacgccgacggcctgtgcgccctgcagcagctgcgcctggcgcagcccggcgacgccacgctggtcaccggcgtcaagcgcgatatccggctgctcgagcgcatcgacgccgggcccggcgataccgtgaccgcgctggacatctcgctggagcagaaccgcgatggcctgatgcggctgctcggcgccggtgcgcgggtggactacttcgaccaccaccatgccggcgaactgcccgggcatgccggcctgtgcgcgcatatcgacgaggggccggaggtctgcaccagcctcctggtcgaccgccacctggacggctgccaccggcgctgggcgatcaccgccgcgttcggcgacaacctgggcagcgtggcgcgcgcgctggcggcgcaggccgggctgggcgagcgcgaaaccgcggtgctggaacagctgggcacgtgcctgaactacaacgcctatggcgagtgcgtggcggacctgcatttcgatcccgccgagctggcgcggcacatgctgccgtttgccgacccgctggcgttcgccgcgcaatgcggggcctatgcggtgctgtgcgacggctatgcggacgacatggcccgcgcgcgctgcctggcgcccgcgcacgaagtgcccggcgccgcgctgctggtgctgcctgacgcgccgtgggcccggcgcgcgatcggcgtgctggccaatgaactggtgcgcgggcggcccggcgacgccatcggcctgctctcgccgaagtccggcggcggctttgccgtcagcgtgcgggtgcccgcccacagtcccaccggggcggccgatttctgccgcggcttcgagaccggcggcggccggcgcctggcaggcggcatcaaccacctgccggacgccgaagtggagcgcttcacgcgctgctttgcagattgcttcggtccccgttcctgataattcagcacggcggcacgaactcggtgacctccaggtcgaagccggtgacggcgcgatacggcaccgggtggctgagcaggcgcagcctgtgcgcccccacatcgcgcaggatctgcgccccgacccccagcgcgcgttgcgcgaaggccggcgccggcgtggcggcggccggcgctgccagccgctccagccgctgctgcggcgattcgcgctcatccagcagcaccagcaccccacaaccttcggcgccgatgcgggcgagcgagcgctccaggttccaggcgggcagggccggcgcgccgaagccgagcacgtcgcgctgcatttccactgcctgcacgcgcgtcagcaccgggcgctgcgggtcgggctgacccagcaccagcgccagatggagcgcatcgaccggcgcgtcatggtaggcgtgcacggtgaagcatccatagggcgtagccagttccgtcgaatgcgtgcggcacagtgcgctttcggtcagcagccggtggtggatcagcccgctgatcgaaaccgccggcaggccgtggtgccgcgcgaaggccagcagggcggggccgcgcagcaggtcgccgtcgtcatcgagcagcatcgcgtaggcgccggcggccacgcgcccggccagcgccggcaggtcggagcaggcctcggcaaagcccgcgcggcgcagcacgccgtcgggctgggccaccaccgggaagatgtggccgggctggaccaggtcatgcggctgcgcgcgcgctgccgccgccacgcgcagcgtgagcgcgcggtcggcggcggagatgccggtgctgacgccgctggccgcttcgatcgacaccgtgtagcgctcgcgctggcggtggttcgcggccatcggcggcagctgcagcagcgcgcggcgcgcctcggtgattgccatgcagaccaggccgcgcgcctcggcggccatgaagttgacatcggcctcgctggcgcgctcggcggcaaccaggacgcagccggtggcctcgtcggtctcgtcctcgatcaccagcacacgctggcccgcggccagtgccgcgagcacgtcggccatcggcggcagtgtggtggcgctcatgctgcctcctgccggctggtactgccgaaggcctggcgcagcgatgccgcggccgcatccagtgcatcgctggcggcatcgatcatcccctgcatgctgataaagccgtgaaactggccgggccagcggcgcacggtggcgctgccgcccgcgcgctgcagggcctcgccataggcctcgccctggtcgcgcagcgggtcgtattcggcggtgatgatggtggctggcggcaggccatgcagctcgcgctggtgcagcgggctggcgcgcacatcggtggcgtccgccgggttggccaggtactgggcgcgataccagtccagttccgcggcactgaggaagtagccctgcgcgcattcgcggtagctggcgctggtggccgcggcgtcgctgcagtccaggtaggggtagagcagcagctggtgccgcagcgcgatggcgctgccgcgcagctgctggcaggcaacggcggcaaggttgccgccggcgctgtcgccggccacggcaaggcgggccgggtcggcgcccagttgcgccgcatgcgcggcggcccagcgcacggccgcgacggcgtcgtcggccgcggccgggaagcgtgcctccggcgcgagccggtagtcgaccgacagcaccagcgcgccgctgcggcgcgccaggccgcggcagatgttgtcgtgcgaatcgaggccgcagaggacaaagccgccgccatggaaatagaccacgagcggcagtgcggtgccgtcgtcgggccggtacaggcgggccttcagcgggcctgcggcgccatcgatggtgaggtcttgctgcgcggcgacggtgtcgccgggcgcgaacgcgggcatggcagccagcgcggcacggtagtcggccgcgcgcagcgcggaaaagtcggggctgggcatggcggccatggcttcaagcacggcgcgggcctggggatcgagcggcatggggtctcctggattgcagtggggaaatcggtgtcagagcgcgaacgccggcgcggtgccggcggcaatgccttgcgcgcgcgcaagcgccgcatgcacggcctgctcgtgtggcaggatccagaactggccggccgagaccccgtccaggatgtagcgcgcgaccgcgtccggcgtgatgccggcggcaatgccgctgcgcagcgcgccgttcatgtggtccacctcctgcgcgccgccgccgtcgaggccggcagcgatgccggtggccaccggaccggggcagaccacggacacgcccagcggcaggcccgccgcctgcaactccagcgcgagcccttcgctgagcgccaccaccgcttgcttggacagcgtgtagggggccagccacggccccacggccaggccggccatcgaggccacgttgacgatatggccggcgccttgtgccgccatgcgcggcacgaagcagcgcagcgcgtgcagcacgctccacaggttgacgcgcatcacgtggtcgaacacttccggcggcagctcccagcagcggccggtgacgagcacgccggcgttgttgaccagcaggtccacacggcccaggcgcaggaagctctcttcacataggtgctcgatctgccgcgcgtcgcagacatcggtggggacggcgatgacgttcgccccctggccggcaagcgcctcgcgcaccgcttcaagcgcgccggcgtcgatatcggccagcgccagcgcgtagccttgcgctgccagcgcctgcgcgagcgcgcggccgatgccgcttgccgctccggtgatcactgcggcctgctgccgcgggtttgccgccatggtcatggttctccgtgaaaagaaggcggcggggatcgccgcgcatggctgacttgtagcggcagcgcggcggcacggcatcgtctgtttgggtaggacagggtggcatcacacggcgtgtaggggtttgcccttgaacggccgggacgggtctgtccttagtctgtttggagtatgtgttcggcccgccggcgcgtgaggattggcctgtcccgcaggactagtccggccagcgtgtgcagccggtcttgcctagggcaaaccacgaaggcgggggcaagccgcgacccctttgccgtccctataatcagggcacaaaaaagggccacagagcccgtagcaggccagcgccgacccggcacgcccgaagcgctgcgcacgccacaatggagacagaggaaaatgctgatggaggttagccagaaccaggcggccgcacacctgttcgcgcaggcgacggtgtcgctgtcggagttcagcacattgctgggcaatatctaccagggcccgatggagcaggtgccctggggcaaggcactggaacagatccgccgccagctcaatgccaactattgcaccctgatcctgcgctcgccggccacggaccggcccgggctgatgatcaatgcgtccgagcatggctcgaccttgccgggcgagacctcctacaacaactactactacgcgctcgacccgttcatcggcctgccgtcggaccgggtggtgaccatcgatgagcatctcgggcccggcgcctggtgccagagcgagctctaccagcagttcctcaaggacatcggcatccgctacatccttggcgcggacctgcgtaccgatgacggcgtcgaatgccgcttccgcgtgtgccgcgagcatgacggacgcgacttctccgccgcggacaaggcgctgtgcaccgcgctgctgccgcacctgaagcgcgcggtggacctgcactcgcgcatcgacgtggttgaatccgagcgcaccgtctatgccagcgccatcgaccgcatgctggtcgggatggtgatcctggacgagtccggcaccatcatcaagaccaatgccgccgccgatgaaatcctgggcgccaaggatggcatccgtgtcgccaaaggcagcctggacgtggaatacggccaggagaaccgcaagttccagcgcctgctgcgccaggccatgatgggccacctcggcaccacgccggcgctgatggaagcgatgtcgatcacgcgcccgtccggcagcgccaggctgggcgtgctgatccgcaccatcccgctcagcgagtggtccgaggacaaccgcaagcgccccgcctgcgtggtgttcatccgcgaccccgagcggcgctcgcaggcctcgcacgaggtcgtgcgccagctgttcgacttcaccccggcggagacgcagctggcgctgcagctggccaacgggctcacgctcgatgaggctgcggacgagctcggcatcagcaagaacacggcgcgcgcgcacctgcgcgcgatcttctccaagaccggcgtgacccggcaggccacgctggtgcgcatgctgctgagcagcgtgatttctctcggctaaaccacgtaacgcacgtcagggctttgcgctgagcaccagcgcaaagccttccggcgtttccagcaccgcgcgcgtctcatgcggcccctgcgccgcgggcagcgtcacgccggcaccggcacccaccagccgcgccattgccgcggcgatatcgtcaccctcatccaccttgaaggccagcgcgggctggtccaccaggcgttcctcgccggccaccagcgccagcgtcagcgcgcccgcgtcgagcgcgcaatagcggtttccgtcgcgaaacttcaccggtagtccgagtccttccgtgaagaacggcagcgcggtgtcgatgtccgcgacggggtaaagcagcagcctggcttgcatgatgtcctgatcctcctggtgaaagcgggcgtgatgcccgcggccaatgatagggatgctccatgtcctgttcataatccaatcagacgatgttgcaacgccttgcgccgaccacactgcgatcacacaggccgtttcgggccggtggcgcggcaacgggcggcgccccggcggcggtcctgaaccatcaatgccagacaaggggactgcaatgcgtttttcactgatctatgaagcccagaccgtcgatgcctcgcgtgccggcgaccacaaggtgttcgatgaaatcatggaacaggtggtgctggccgaggacatgggctttgacgtggtctgggcggtcgagcacaccgcactgaccaactatgcgcacatgagcgcgccggaaaccttcctggccttcgtcgccgggcgcacgcagcgcatcggcatcggccacggcgtggtgtgcctgccgccggcgatgaaccatccggtcaaggtggccgagcgcatcgccacgctggacatcctgtccggaggccgcgtgcacttcggcgtgggcaagggcggcacccagcaggaggccggcaccttcggctacgacctgaacagcctgcacccgatgatcgacgaatcgatgtacctgatcccgaagatcatgacgcaggacgagatcgagcacgacggcgagttcatcaagatcccgcgccgcccgatccaccccaagccgcgccaggacccgcacccgctgatgtacctggcctgcaccaatgccgacacgctgcagcgcgccggcgcgcgcggcatgggcgcgctggtgcttggctttggcggccccgaggatgtcgccaaaaagaacgagatctaccgtaccgcgtgggagacccgcaagcctgaggaccaggtgggcttccgcccgcaccagcacctggccgcgctgtgcccgaccatcgtgctggaagacggcctggccgcgcgcaagatcggcatcaagggccagcgttatttcatggagtcgctgtcgtactggtatgccggcggcgagcggcccgacccgtccacctgggacgacgagcatgtcaccgccacggacgcgcagggcaaggccgtcatcaacaccaagttcgcctcagagaaggtctcggtggatttcagcgacccgtcgatgatgatgctcaaccccaaccatgcctacggtaccgtcgaggactgtatcggctacgtgcagcgcctgatcgattccggcgccgacgagatcctgttcatctgccagatgggcacggtgccgcagtgggcgcagctggaaaccatccgcaatatcggcgagcacgtgatcccgcacttccgcaagcagggacggaagctgcgcgcgctggcttgatcggcgctatgcaagcctgcgggtttgctcccctctcccgcttgcgggagaggggccgggggagagggccagagcatccacgaagtcccactcaccaaatcgcgacatagctagtcccaacagacgatggcacccggccccaccggtgcaaacatcaaggccagctacaagaccaagcaacaaggagaccgcggtgcatcacgacaacaatcccaaggaactggcggcacggctgatcgcgcgtgccgagcagatgattccggtgctggccgagcgcgccgcgcaggccgaggccgaagcgcgcattcccgccgagaccattgccgacatgcaggccgcgggcttcttcaaggtgctgcagccccgccgccacggcggctacgaactcgatccgcagaccttcttccgcatccagatggcgctggccaagggctgcatgtccaccgcctgggtctatggcgtggtcggcgtgcacaactggcagctggcactgttcgacgagcgcgcgcagcaggaagtgtggggcagcaaccctgccacgctgatcgcctcgacctatatgccggtgggcaaggtcacgccggtcgaagacggctatcgcttctccggccactggaagttctccagcggcagcgaactgtgcgactggatcttcctgggcgggctggtgccgccggccgagccgggcggcgcctatgactaccgcaccttcctgctgccgcgctccgactacaagatcgtgcgcaactgggatgtgctgggcctgcgcgcgaccggcagccacgatatcgtggtcgaggacgtgttcgtgcccgagtaccgcacccaccgcgccgtcgatggcgccatgggcaccagcccggggctggcggtcaatgacgttccgctgtaccggctgccgttcgcgcagatcttcgtgcgcgcggtgtgcaccgcctgcatcggcgcgctggaaggcacgctcgatgactttgtcgcctatgccgacggccgcgtcagcagcaacggtggcggaaagaccgcggaagacggcggcgcgcagatggcttgcgccaacgcgcaggtcgccatcgacgagatgcggaccatccttgagcgcaatttcgacgagctgctggccgttgcgcgtgaaggcggccaggtgcagaccccgcgccgcctgcatttccgctaccagtccgcgcaagtggccgagcgctgcgcgcagctggccaacggcctgctgcgctatgccggcggcaacggcatctaccgcagcaacccgatggtgcgccgcttcctcgacctgcatgcggcccgcgcccactacgccaacaacctggaccgcttcggccagaacctgggcggcgtgatgatgggccgcgccaacactgacttcttcatttgagccgcgcgccgcacggagatccaatatgagccagagcagagcgcgcatgcagcccagcgagttcgacgtggtggtggtcggctcgggcgccggcggcatgctggccgcctgccgcgccgcggaccgcggactgtcggtggtggtgctggaaaagagcagccagtacggcggcacctcggcggtgtccggcggcggcatctggattccgctcaaccaccatatcgcgccggcgggcgggcgcgacgactacgccacggcgctggaatacatcctggcgtgcgccggcgagcacggcgatccacagcgcgtgcgcgcctatcttgagcaggcgccccgcatgctccagtacctggagcagcaggccggcgtgcgttactacacgctgccgcgctacgcggactacttccagaaggttccgggcgcgatgccgggctaccgcgcgctcgacccgatgccgttcgacggcgcgcagctgcgcgaggaattcgcacggctgcggccgccgtcgccgggcacgctggtgggcgggcgcgtggccgtgacctcggccgaggcgcatgcgctgctgtgccgcgcgcccggctggctgggcctggcggtgcgccagtttgcccgctactggctggacctgggctggcgccgcaagacccggcgcgaccgccggctcacgctcggcaacagcctggtcggcggcctgcggcgggccatgatggaccgcgcgattccgctgtggctcgacaccgcgctgcaggacctgatcgtcgaggatggcaccgtgcgcggcgtgcgcgcggtgcaggacgggcgcgtggtggagatccgcgcgctgcgcggcgtgatcctggccgccggcggcttcgagcgcaaccaggccatgcgcgaacagtacctgccgcagccgacccaggccgcctggagcgcgaccccgcccaacaacaccggtgacggcatccgcgccgcccaggccgccggcgccggcgtggcgctgatgtcccacgtctggggcgcacccaccgtgcatgtgcagggcgaggaaaagcagcgcgcgctctttatcgagcgcgccatgcccggctgcctggtggtgaacgggcagggccggcgcttcgtcaacgaggccgcgccgtattccgagttcgttcccgccatgtaccgcgaccacgagaaaaccggcagcagcgtgccggcgtggatggtgttcgacgccgccttccgccacaaatatccgtgcgggccgatcctgcccggctcggtcatgccggaccgcagcattccggcaagcctgtccggcatcctggtgcgcgccgactcgctggcgcagctggcgcagcggatcggtgtcgatgccggcggcctggccgacagcgtggcgcgcatgaaccactatgctgccaccggcgtggacgaggagttcggcaagggcgacaacctgttcgatacctactacagcgacccggcagtgcggcccaacccgtgcctggcgccgatcggcaaggcgccgttctacgccgtgcgcatcgatgccggcgacatcggcaccaagggcggcctggtgacggacgccagcgcgcgcgtgctgcgcgacgacggcagcgccattgccgggctgttcgccatcggcaataccagtgcctcgatgatgggcaccagctatcccggcgcgggctcgacactgggcccggccatgaccttcggctttatcgctgccgacgtgctctctcagaacgcgcgccagcctgccgccgcgccccatgctcaaaccgtacaggaggccctatgagcgccaaccccgaacccagcaccgcgctgcgcgaagacatgctgatggcgatgcgccgcatggcgcgctcggtggcggtgatcagctgccgccatggcgagcgccgctattcgatgtccgtgaccgcggtcgattcgctgtccgcggacccgccttcgctgctgatctgcatcaaccgcaattcttcgatctacccgccgctggatgccggcgcggacttctgcatcaacctgctggcagccgaccaccgcgatatcgcagtggattgcagcggccggctcaagggcgaggaacgcttcaccagtggcgagtgggaggacgatctgctcggcgtgccgtgcctgcgcgatgcccaggcgaacctggtgtgccagcaggatggccgcttcgactacggcacgcacgcggtcttcatcggacgcctgcgcgaggtaaagctggctggcgaggtgtcgccgctggtctatgtcgatggtgcctacaccacgtccgcgccgcttggcgcactgtgttcggcctaagccgggagcgcaagccagcatgtaccctccgaccgattccgccacgccggtccacgcgccgctgcgcctcgacgatccggacgcacacccgtggcaggccgcctgcgatgccgtggtggtgggcttcggcgccgccggggcctgcgccgcgctggaggccgcgcatggcggcgcgcgcgtgatcgttgcggaacgcttcgaaggcgggggcgccagcgccaagagcggcggggtggtctacgccggcggcggcacgccctaccagtctgccgcgggctatgccgatacaccgcaggcgatggcggactacctgcgccaggagacgggcggggtcgtcagcgatgccacgctgcaggcgttctgtcagcgcagccgcgagatgatcggctggcttgaaggcctgggcgtgggctttgccgccaccgtgccgccgcgcaagacctcgtatccggcgcagccctactacctctactactccggcaacgaagcggtcgccgcctacgcgcagcatgccgcgcccgcgccgcgcggtcaccgcgtgaaaggccccggcatgtccggccgcacgctgtacgccgtcctgcgcgccgccgtgcaggcccggccggaggtgacggtgatgcgccagaccgcggcaaggcggctgattctcgaccaggacggcgcggtcgtcggcatcgagctgtggcagctgccgccgggccgccaccagaaacgccacgcccgcctggcgcgcctggccgagcgcctgcacaacgtagcgcctgcgctggccgacctgctgcgcgagcgcgtgctgcaactggaactgcgccatgcgcgcccggtcgcggtgcgcaccggcgcggtggtgctggccaccggcggctttatcttcaaccgcgccatggtggcgcgccacgccggcaaatacctgcagaactggcgccttggcgcgaccggctgcgacggcagcggcatccgccttggtgagtcggcgggcgcggccacgcggcacctggagcgggtctcggcatggcgcttcatcaatccgccgttcgactgggcgcgcggctgcgtggtcgatgcgcagggtgcgcgcatcgccaacgaggaaacctacggcgccacccttggccacgccatctgcgaacagcacggcgggcgggcctggctggtcctgaaccgcgaactggcgcgcgccgcgctgcgtgaatgcctgggcggccggctgtgggccttccaggccttgcccgcggcgctgctgatgctggcgggggcgcggcgtgcctccagcctcgaagcgcttgccggcaagctgggcatgcccggcgcggcgctgcgggccaccgtcgatgcctataacgccgcggcccgcggcgagatcccggatccggccggcaaatcggcgccgatgtgcgcgtcgctcgaaaccgggccgtggcttgccatcgacatctcggccaacagccgcgtctttccgtgccctgccatcacgctgggcggattgtcggtggaagagtccagcggccgtgtactggccgccgctggcggggcgcccattccagggctctacgccgtgggccgcactgccgttggcatcgcatccaaccattacgtaagcggcctgtcgcttgccgactgcatctggtcggggcgcaacgcgggccgccatctgacacgacagcctgccggcgaccggcaggcacacaccaacgaggagaccacccatgagccaacgtactgaaggaaagatcgccatcgtcaccggggccgccagcggcgtcggcaaggaagacgcgctgctgctggcgcgcgagggcgcgcgcgtggtgctgaccgacctcaacgaggaggcgggccatgcgttggcgcgcgagatcggcgagaccgcgctgttcgtgccgcatgacatcgccagcgaagccggctggcagcaggtaatggcgcgcaccgaaaagcaattcggcgcccccagcgtgctggtcaacaatgccgccatcctgttgctgggttcggtcgaggacgccacgctggagcaatggcagcgcgtgatgcgcatcaatgccgacggctacttcctcggctgcaagtacggcgtggccgcgatgaaggcgggcggcggcagcatcgtcaatatgtcgtcggtggcggcgctgggcggcatgggcgcgttctgcgcctacagcgcgagcaagggcgcggtggctgcgctcacgcgcgcggtggcggggcactgcaagcagagcggctaccggatccgctgcaactcgatccacccggacggcatccttacgccgatgaccgcggccttcctgccgggcggtgccacggccctgccggaggaggtgggtggcgccgagccgatgcagcgcatgtgccatccgcgcgacgtggccaacctggtgctgttcctggcctccgacgaatcgcgctttatcaacggtgcggaactgcgtatcgacaacgcgcagaccatcatgggcgtggcctgaccccgccctcaagcaatagaaggacatcatggcgccagtgcaattccaccggctgcagatcgccgaagtcgtcacggaaacggaccaggcgcattcgctggtattcgcgctgccggacggcctgcgcgatgcgtttgcctaccgtcccgggcagttcctgaccctgcgcgtgcccgtggacggcgtgccgctgcagcgctgctattcgctgtcgagcacgcctgaggtggacaacgccctgcgcgtgacgatcaagcgcgtgcagagcgggcgcgtgtccaactggatctgcgaccacctgggcgcgggcgatacggtcgaggtaatgccgcccgccggggtgttcaccccgcccgcgctgcatggcgatttcctgctgctggccggcggcagcggcatcaccccggtgctgtcgatcgccaaggcggcgctgcgccacgggcgcggcgcggtcacgctggtctatgccaaccgcgacgagcgctccatcatcttccgcgaggcgcttgcggaactggcgcgcaaccaccccggccggctgcgcgtgatccactggttggacagcgtgcaggggccgcccacgcagcgccagatcgaggaactggtgcggccgtggagcatggcgcaatgctttgtctgcgggcccggcccgttcatggacggcgcccaggccgcgcttcaggccctgggggtgccgcgcgggcaactgcacgtcgagcgcttcgtgtccttgcccgatgtgccggcggccaaggcaccggcaagcggggccgccagcgcgggggacaccgccacggcatcgcccgcgcccgcgatgcgcggcgccgcactgaccgtgcagctcgacggcgagatccaccacgtcggcgtggcgctggacgaaaccgtgctcgacgcgttgcagcgcgccggcgtggccgcgcccaattcctgccgcgccgggctgtgcggcgcctgcatgtgccaggtgacgcagggcgacgtgacgctcggcgagaaccatgtgctcgaccgcgccgacctggaggcgggctggaccctggcttgccaggcccgcccgtccagcgccgaaatccacctgaagttcccggattgacatgaccccatctgacatcatcgacgccattgcggcaccggccggcctcgacctcgacctcgccgccgccaacgacgacattgccgcgaccattcccgagctggtgcggcgcgcggccaggcgccacggcgagcgcatcgccatccaggaggacgggctgcgcctcacctacgccgcgctcgacgccagccggatacaggcggcccgggcgctgatggcgctgggcgtgcagcccggcgaccgggttgccatctgggcgccgaacttctccgaatggatcatcgcggcgctggccacgcacagcataggcgcggcgctggtgccgctcaacacgcgcatgaagggggccgaggccggcgccgtgctggccgacagcggcgcgcgcctgctgctctgcgtcgacgctttcctcggcgaaagctatccgcagatgctggcgccacaccgccccgccacgctggagcggctggtgatcctgcgccccgggcagggccggacgcccggccccgacgagctggcctgggaagccttcctcgcgctggcgccacaggcggacatggcggcgttcgccaagcgcgaggacggggtgcgcggcgacacgctgatggacatcatgttcacctcgggcaccaccgggcgtcccaagggcgtgatgaccgcccacgcgcagaacctgcgtgccgtcgacggctgggccgccatcaccggggtgcggccgggcgaccgctacctgatcgtcaatccgttcttccatacctttggctacaaggccggatggctcgccgcgctgtcgcgcggggctacggtgctgccccacctggtgttcgacgccgaggccgtgatgacgcgcgtggagaacgagcgcatcacggtgctgcccgggccgccgacgctctaccagaccctgcttaacgcgccgcgcctgcgtgagttcgacctgtcgtcgctgcgtgtcgcggtgaccggtgcctcggcgatcgcgcccgcgctgatccagcgcatgcgcgacgaactgggcttcgacaccatcatcaccggctacggcctgaccgagtcgtgcggctttgccacgctgacccgcgccggcgacgacgccgaaaccgtcgccgccacctccggccgcgccatgccgggcatcgagatccgctgcatcgatgggcaggggcagccggccgccaccggcgaggcgggcgaggtgctggtgcggggctacaacgtgatgcagggctacttcggcctgcccgaagccaccgccgaagccatcgacagcgaaggctggctgcataccggcgatgtcggcacgctcgatgcgcgcggctacctgcgcatcaccgaccgcatcaaggacatgtttatcgtgggcggcttcaactgctatccggcggaggtggagaagctgctggtggcgcatccggccgtggcccaggtggcggtagtgggcatcccgcacgagcggctcggtgaagtggggcgtgcctacgtggtgctgcgccacggcgcgcgcgtggacgccgaagccctgatcgcctgggcgcgccggcacatggccaactacaaggtgccgcgcgaggtgctgttcgtgacgtcgctgccggtcagcgcggcaggcaaggtgttgaagtaccagttgcgtgaagcctgatgaacaaggaaccgatcatgaccgacattgccgccattgccgaccgcgtcgcgcggctggaagccgcggaggcgatccgcgcgctcaagctgcgctacctgcgcgcttgcgatgacaaggaccctgacgcgatgcgcgcctgtttcgtgccggacaacgcgcatatccactatgaccggatcggcagctttgccgggcgcgaggcactggtgcagtgctttgcggaactggcgtgccggccgacgctgcgggagatgcattttgcggggcagggggatatccgtgtgctggatgacaatctggcgcagggcagctgggatctggcctacctggcgctggatgatgccagtggttcgcgtacctttctaacgggacgttatgcggatgagtatgtgcggatcgatggtgcgtggctgattcgctcgacgatgttcacgacggggttggtgtcgcagggagggtaggaggccgcgcttgtttgcacccctttcccgcttgcgggagaggggtgcgcatgcgagaggtggtggcaatttccaacgctcgcgcgcgcccaattcctattccacaatcgccggatgcaccggcgggggcccgcccagtgtctgccggtacgacggcggctgcaccccctccgaatcgacgatgccataggccagcgccgcttcggcgctaatcaacacccggccggacttttccatcagcgcagggtcgcggtacagcgcatcgataatcctccccgtgaactccggcgtctccgccaccggcgcgaagcccgcgtacttgtccggatgcttttcccatacccgcagtgtgcgcgcagtgcgcagcggccccatccacagcgacaccgccgcgacgccgtagggccgcaggtcgaccgccatgtcgtgcgcgaacttgtcgatgcccgccttctgcgcgccgtaggccggaccgtgcatatagcagttggcaccgaatgacgaggtgaacacgatcagcccgcggccctgcgcggccatcatgggcgcggcatgccagctggcgacgtagcctgagcgcaggcccacgtcgaggatgccggccatctccagtggcttctgccagaacggccccggcatgatgagctcgtcgtgcaggaaggtcgcattgttgaccaggatgtcgatccgaccggattcctctcgcacccgcgcgaacagacgcgccacctgcgcatcgtcgcgatgatcgcacgcgagcgcgatgccgcgcccgcccagcgcatcgatctcgcgtgcggtggcgtggatggtgccgggcagcggcgcgctgccttcctgctcggtgcgtccggtcacgtacaccgtggcgcctgccgcaccgagcgccagtgcgatgcccttgccggcaccgcgcgagccgcccgtgacgacggcgacgatggcctgttccgcctgcttcatgtgtgtctccttcattgatgtcatcgaagcttggaacgggcacggcatcgcgacatccttcgttcggactaagcgatacccggtccggatactccacgcggacgatggcccccggcgcggcaaggccgacgatagtccccatcccaacgactgcccgcgcggcgtatcgcggcgctggcggtcacaacaaggagtgagactggccatgtctgaactggagtgcaaggaagccatccatgccctgacctgccgctatgcgcaggcggtggaccggcgcgatttcgcgaaactggcagcgctgttcacggcggacgcatggctgagcgggccgggcttccgcatggacggagcgcaggcgattgctgacggcatggcatcgctcggccagtacagcgccacgcagcatcacgtgcaccagcaactggtcgaagtcgatggcgataccgcgaccggcgagacctattgcgtggccaaccacctgtacgaacaggacggcgtgccgcgcaagctggactggggcatccggtaccaggaccgcttcgtgcggcgcgacggccagtggcgcattgccgcgcgcgagctggtggtggactggacgcaggacctgccgctgcgaggggcatgatgacgacgacccgtgtactggaaggcaagacagccctagtcaccggcggcgccggcggcatcggtgcggccagcgcgctggcgctgctgcgcgacggcgcgacggtggtcctcatggggcggcggggcgaagcgctggaagcggcacggcgcagcctgtgcgcgcaggtggccggcgccaccgtggcaatcagcgtcggcgacgcgtgccgcgaggatgacgtgcaggccgcgctgcagcaagcctgggagctgcagcggcgcctcgatatcgtggtcgcgaccgttggtgggggcggcttccgtccgctgctgatgcatgacgcggcctcgctgatggcggagctggagctgaacatcgccagcgcattcctggcggtgcgccacgcgtcgccgctgatggcaccgcatggcggcaccatcgtctgtatctcgtcgaacgcggcgcgcatgacctgccggtggctgtcggcgtactgcgccgccaaggcggggctggaagcgttcgtgcgcgccgcggccgaggagctggcgggatgcggcatccgcgtcaatgcggtgcggccggggctaacccgctccggcgcgaccgggccgatgttcgacaacccggccatcctcgacaagttcgtcgcgcagatgccgctggggcgcgccggcgaaccggacgacattgccagtgcggtgcgctacctggcggggccggaatcgggctgggtgaccggccagagcatcgccgtggacggtggcagcgagctgcgcggcaatcccatcctcgatgaaaccgtggctgcggtgtatggcgaagccgcgctgcaggccgtgctggccggcaggattcccgaagccggctgaagccggcaactcaaggagagaaacgatgcatcaagtcagggacaaggttgcgctggtcaccggcgcggccagcggggtagggcgcgccgacgcgctgatgctggcggccgaaggcgcgcgcgtggtcatcagcgatgtcaaccaggaggccgggcaggcactggcccgcgagatcggggatgcggccatgttcgtgcgccacgacattgccagcgaggaggactggcgcaaagccatggccgccacgcaggaccgcttcggccggctcgacgtgctggtcaacaatgcggccatctgtccgctcgggtcaatcgaggaaacctcgctcgacagctggcggcaggtcatgcgcgtcaatgccgacggctatttcctgggctgcaggttcggtgtgcaggcaatgaagggcaaccccgccgggggctccatcgtggtgatgtcgtcggtggcggcgctgggcgggctgcccatgatgtgcgcatacagcggcgccaagggcgccgttaccgcgctgacgcgcagcgtggccgtgcactgcaagcagaacggctaccggatccgctgcaactcgatccatcccgatggcgtctggacgccgatgacgcaggcgctggtgccggacctggatccggccacgcttggtatcggtacggacccgatggcacgcatgtgcctgccggaggatgtggccaacctggtcctgttcctggcttcggacgcgtcgcgctttatcaatggcgcggaattgcgcatcgataacgcgcagttgatctcggggctgtaaggcccgctgcggcggcccgcgcaagcaggctgccgcagcgccgggctaactgtactgcgtcacgatctcgccgaccgtgcgcaggatgtcgcggcggcgatagccgagcagggcggcctcggccgcgtccggctcatagtagagggtgttgccccggccgaagcagatggccgagtccggcagcaacggatgctcctggtcgatgacaggcggcaccgggcggcccgcgtcgcggaagaaggcaccgaaatagtcctggaacgacaggttctcgtcccctaccaggtaagccttgccgttttcaccgcgcaacagcgcgccttcgatcgcttccgagagcgaagtggccgagatgaagttgacgccgccgggtggcgcgaaatccggcatcggcgcaaagttgccgcgcgcgtagtcggtataggccttgaacatcggcaccatcaggcccggcaccgtgcccacgacgaacggcgcgttcacgctgctcacgcggaaggcatcggtggccagcgcgcgaacgccttcgtcggccagcttgcgcgagcggatataggcgttgtcctcggccagctgcggctgtgcctgcgggtagaagctgccgacgtagacggcgacccggatcccggcagcgcgcgccgcgcgcaggaaacgcggcacgccctcgatgttggcgcgctcccagtgcgcggcttcgtcgccgccgggcggcacgtggcgcacatcgttgccggcggcgaagaccagcgcgtcgaaggcgccgagctgcgcggccggcacgtcgttggcgatgtagtcgcagcgcaggaagtccagcccgcccagcgtcgtgccgggcgcggggcggttgcgccccgcgatggtgacgtcgtgcccgcggctgcgcaggtgcagggccgcgtggcccccgatcatgccggtgccgccgacgatcagtatcttcatgcttgtctccttggtggggtggtgtggccgcggtgcgcggccatcagaggttcatgccgttgccgccgatgaccggcatgttggtccacgtgcccttggggtcgcgataccagccggccgcggccagcgcgccgccattgacatgcagcgccgtgccggtaatccaggccgcgcgctcgctggccaggaacaggatgccgtcggcaatgtcgcgcggcgtgccgaagcggcccagcggaatccagcgcgggatatggtgctggtgttccgcagcgaccatctgcgacaccggaacctgcggcgtttcggtggtctcgggggcgatcaggttgacgcggatccccgccggcgccagctccagcgccaggctctgcgtgaagccggtgatggcggccttgaaggcgccgtagacgctgcagtagggaatgccgcggaaggcctcgatcgacgacaccgtgacgatgctgccggcgccactgcgccgcagcagcggcagcatggcgcgcgtgacggtgaagacgtggcccaggttggcggcgtacaggctggcgatctcgtcgtcggcatagtgctcgaacggcttggcgatgcgcaggaaatcgccgacgttgttgaccagcacgtccagcaccccgaaacgctgttcgacctgcgcagccagttcgcgcacggtgccggcatcggtggcatcgccctgtaccaccagcacttccgtgccgggcttgttcaacaactcccgggcttgcccggcgcgctgtgcttcgatctcgatcagcgccacgcgcgcaccctgttccaggaaggcttgcgcggtggcgagcccgatgccggcgccgccgccggtgaccagcacggtcttgtcggtgaaatccatctgagtcgttctccttcggttgccctgtggtgtgcggccatttgatcggcggcaggcgggaccggcatcgtccgattgcaggtcagggaaaacacttagatggtgcaaaccagggcgaacaagggcgccgcgcgccggacatcggcaggcagcctccctataatctgcgctgctcaggtgccgcagagcaccggccagtccatgcatggggcgaggaaacaggagacagacaatgttgatggcgaccgttgaggcgcaaggggtggcgtcgccctggtttgcgcagtccggactgagcctgccgcaattcagcgcgctgctggcggcggtctacgaagggccgatggaacccgtgccctggggccgcgcgctggaaatgctgcgcaagcaacttggtgccagctatgtgagcttcatcctgcgctcgcccgcgagcgaccgcagtggcatcgcggtgcacgcgtcgcaggacggcacttcgctggaggccgaggcgtcgtacaacacctactactacgccatcgatccctttatcaacctgcccacggaccgggccgtgacggtcgacgaagcgatgggcgccggcaactggtgccgcagcgagatctaccggcagttcctgcagccgcttggggtgcgctacctgctgggcgccgacatccgcaccgaagacggggtcgagtgccggctgcgcgtctgccgccagcacgacgcgcaggacttctccgaggtggacaaggcggcgtgcgccaccatcctgccgcacctgaggcgcgcggtccggctgcattccaggctggatgtggtcgaatcggagcgcagcctctatgcgggcgcgatcgaccgcatgctggtgggcatggtcatcctcgacgcagccggtgcaatcctgaagaagaatgcggaagccgacgagatcctggcggagaacgacggcatccgcctcaacggcgccaacttcgagatcgcctacgcacaggaaagccgcaagttccagtacctgctgcgccgcgcccagatggggcatcacggcagcgcgccggcgctggccgaagccatgtcgatcacccgcccctcggggcgcggcaagctgggcgtgctgatccgcaccattccgctcagcgaatggtccgaagaccaccgccatcgcccggcctgcgcggtctttatccgcgatcccgagcgcaagtcgcgcgcctcgcacgaggtggtgcgcaagctgttcgacctcacgcccgccgagaccgcgctggcgctggtgcttgccgacggcatgacgctcgacgaagccgccgaggcgctgggcaccagcaagaacacggcgcgcgcccacctgcgcgcgatcttctccaagaccggggtcacgcggcaggccacgctggtgcgcatgctgctgagcagtgtggtgacgctcggctgagcgccagggcgtcatccacgcacgcgtgttccagggcacgcgtaactccctcgtggcccgacgatcggttctcctagtccgaatggaggatgagtcccgccatgcgcgcccctagcatgcatccgacaagcgggcgcggcacacggatggcacctcagacggacgcggcgacgcgtgctgtccgcgcttggtcctgttccgcgcacgcatcaacctgtccggccccggccggcacctgtaccagggagcgtggagcatggaaaaagtcatctatatcgtctggcgcgattctcagaccgagccgggggagttcgcgcgccggctgcgcacgacgcttgcggacaagctattggcgctgggcgcgcgcggactgcaggtgaacgtggccgatgacgcggtgttgccggccgcgggcctgcgccaggcgaatacccgcccgcagatggacgggctggtctcggtctggatggacagcgccatcgaccgccagcggcagccgttcgaccaggcgatcgcggccgccgtgggccgcatggccggctacctcgtgaccgagtcccagcccattcgcaatacacgtttcccggccgcgcccggcgaacgcacgcccggcttcgcgcagcttgccttccttacccggccgccccggcttacgccgcaggcctggctggacatctggcacaaccaccacacgccggtggcggtcgagacccaggacaacttcctctacgtgcagaacgtggtggtgcggccgctcacctacgccgcgccgcactacgacgccattgtcgaagagggcttccccgatgcggcgatgaccgacccgcaggcgttcttcgacgcggccggcgacgaagacaagttccagcgcaacctgcaggccatgatggaaagctgccagcgcttcatcgacttcgacaagatcgacgtgatccccaccagccagtacctcgtgcgcccggcagcggcgtgacgcccgcgccggaccggctagtcccactggacgatgtgccgggctccagcgcacggaagaatggtcccatcagccagcagtggcaacgaacctgaggagaccggcatgttggatatccgtgcgcttggctacatcgtggtcgagtccaccgacctggggcaatggcggcgctatgccgaacaggtgctgggcatgacctgttccggcgcccccggcggtgcgctgtacctgaagatggatgagcgcgattaccgctacctggtggtgccgggcgcgcgcgaccgctacctggcatcgggctgggagcttgccgacgagccggcctaccgccatgcgctcgacacgctgcgccaggcgaacgttgaggtcgtgcacgccagcgccgcggaactggcacagcgccgcgtgcaggccatggcctggtttgccgatccctcgggcaaccgccatgagatctcctggggcatgcgctcggacttcctgcgctttatctcgccggtgggcgtgccgcgcttcgtcactgacccgatgggggcgggccatgcggtcctgcccgcgccggccttcgacgagacctatgccttcctgtgcgaggtgatgggtttcggtttgtccgacatcttccgcgtgcgctttaccaatgacccggccgaatcggaaaagcgcatccacttcctgcattgcggcaacgcccgccaccacagcctggcgatcttcgagatgccgtcggaagcgggctgcatccacgtgatggccgaggttccggacatggccgaggtgggccgcgcgctggaccgcgcgcagcagcacggcgtgaagctctcggccacgctgggccagcactgcaatgaccgcatgacttccttctacatgaagacccccggcggcttcgacctcgagttcggccacggcggcctggaggtggactggagccaccacgccgcctacgaggccacgcgcgtcagcctgtggggacacgacttcagcatcggataccgctaaacacatcatgaccaagacaatcgacaagatcatgagcgcggccgacgtggtcggccagctcgccgacggcatgaccatcggcatcggtgggtggggcccgcgccgcaagccgatggcgctggtgcgcgagatcctgcgctcgccgctgaaggacctgaccgtggtcgcctacggcggccccgaggtgggcatgctgtgcgcggccggcaaggtgcgccggctggtgttcggcttcgtctcgctcgacgtgattccgctcgagccctacttccgccaggcgcgcgagcgcggcgtgctggaagtgatggagcttgacgaaggcatgctgcagctgggcctgcgcgccgcggccgcgcgcctgccgttcctgccgacgcgcgccgcgctgggcaccgacgtgctggacatgaacccccagctgaggacggtgcgttcgccctatgccgatggcgaagtgctgttggcgatgccggcgatcgagctcgatgccgcgctgctgcacgtgaacgacagcgatgtgctcggcaacacccgcatcgacgggcccgatccgttcttcgatgaatggttcgcacgcgccgcgcaccgctgctatgtgagctgcgaagcgctgcacctgcgcctggaggatgaagacctggcgcgcgcgcgcaacaacgccttcgagcgctcgctggtaagcggcgtggtgcacgcacccggcggcgcccatcccacttcctgcgcgccggcctacggctgggacctgcccgcgctgaaggcgtactgcgccggcgccgaggccgaggacggcttccgtgcctaccgcgacgaggtggtgggcgcgagcgaagcggcctacctggagcgcatcggcggccttggccacgtgcacgacctgccgctgccggtactttgaacccgccaacccaaggagcgaccgtgagcgccacttatgaattcacccgcgccgagctgatgattgccgccgccgcccgcgaatggcgcgacgacggcgaggtgctggccaccggcatcggcaccggcccgcgcatcgccgccagcctggcgcggcttgcgcacaacccgggcctgctgctgaccgacggcgaggcctacctggtggaaacgccggtgccgctgggcccgcgcgagcccggctacaaggtgcgcgccagcggctggatgggctactcgcgcgtgttcgactgcctgtggggcgggcggcgccatgcgctggtgatgccgacacagatcgaccgcttcggccaggccaatatttcctgcctgggcggcacccatgcgcagcccaggacccagctgctgggcgcgcgcggctttcccggcaacagcatccaccacgccaattccttcttcgtgccggcgcacagcacgcgcgcgttcgtcgccggtgaagtcgacatggtctgcagcgccggctacaacccggcccgccggctggagggcatgcgcagcttcgttgacctgcgcgtgattgtcaccgacctgtgcgtgatggatttcgggggggctgaccatgccatccgcgtgcgctcgctgcacccgggggcgagcttcgaccaggtacaggcggccaccggctttgcgctggcgaacacgcccggcgaggccctgccggagacggcgccgccgacaccggaagagctgcggctgatcgcccagcttgatccgcacaacctgcgcgcggccatcgtgcgcggcaatccttccggacgcgtgtgaggccgacatgacaacgccagctaccgaagccatcagccttggccccaatgccgaggtgctctaccaggtcgcggacggcattgccaccgtgaccatgaaccggccgcagttccacaacgcgcagaactcaaagatgacctacgcgctggacgaggcctaccggcgcgccgccgcggacgacgcggtcaaggtgatcgtgctgcgcggtgctggcaagcatttctcggccgggcacgacatcggcacgccggggcgcgacatcaacgagtcgttcgagcgtgcctcgctctggtatgaccatgtcaacaagccgggcggcgagtttctctatgcccgcgagcaggaggtctacctgggcatgtgccggcgctggcgcgagctgcccaagccgaccatcgccatggtgcatggcgcctgcatcgccggcgggttgatgctggcatgggtatgcgacctgatcgtggcgtcggacgatgccttctttgccgatccggtggtgcgcatgggcattcccggcgtcgagtacttcgcgcatccctacgagctgcatccgcgcatcgccaaggagttcctgttcctgggcgagcgcatgggcgccgaacgcgccgagcgcatgggcatggtcaaccgcgtggtgccgcgcgacgcgctggaagacaccgtctacggcatggccgccaaggtcgcgcagatgccgcggctgggcctgacgctgaccaagcaggcggtcaaccatgtggaagacctgcagggcaagcgcaccgcgatggatgcggtgtttgcctggcaccacttcgcccatgcgcacaacgagctggtcagcggcgacaagctcggcggctatgacgcgcgcgccatggccgcttcgcaacgcaccggcgaggacaaggcatgagccccgcgagcctgcacaccgtgctgtgcgacctgctgggctgccgctaccccatcgtgcagacggcgatgggctgggtggcggatgcgaagctggtcgcggccagcggcaatgccggggccttcggcttcctggccggcgccaccattgcgcccggcgaggtcgagcgcgagatcctgcgcgtgaaggcgctcagcgaccggcccttcggcatcaacttccacatgttccagcccaacgcggatgaagtgatcgagatggcgatccgccaccggctgcgcgccgtcagctacgggcgtggcccggacgcgaagatgatcggcaagctcaaggcggccggcgtggtctgcatgccgaccgtgggcgcggccaagcatgcggccaaggccgtggaactgggtgcggacgtggtcaccgtgcagggcggcgagggcggcggccataccggcggcacgccgaccacgctgctgctgccgcaggtgctggacagcgtgagcgtgccggtggtggccgccggcggcttcttcgacggccgcggactggccgcggcactggcctacggcgcggccggcgtggccatgggcacgcgcttcctgatgtcggccgaatcgccggtgccggcgccaacgctggagcgctacgtcaaggtgcgcgacccggccagcatccgcgtgtcgctggccattgacggcctgccgcagcgaatgatcgacaacgacctgctgctggcgctggagaaggccggtccgctgcggcgcacctggctggcgctggcggccgcgcgcaagtggcaggcgcgtaccggcatgcgcagcgcgcagatgctggccaccgcctggcgcgcgatgcgcgagcaggactacagcgccgcccagaccctgatggccgccaacgcgccggtgctgatccagcgcgcgatggtcgagggatgccccgatgaaggcgtgctgcccagcggccaggccgccgcggcgatccgggccatcgaatcctgcgagcagatcgtggccggcatggccgcgcaggcacaggcgcgcctggcggcgctggctggcgccggactggctgcagcggcctgacccacagacagaggaaaccatgcaaacgaacaaaaagaccgggccgttccgcatcgacaccgccgatggcatcgccgaactggtgatcgaccatgcgccagtcaatgcgctcgactgcgccggctggcatgcgctggccgccgcgatcgaccagctgggcaccgatcccgccgtgcgcgtgatcgtgctgcgcggcgaaggccgcggcttctgcgccggcgtcgacatcaaggagctggccgcgcacccgcagcgcatcgtcgatgtcaacgccggtaactacgccaccttccgcgccgtgcaccgcaatcccaagccggtcatcgtggccgtgcacggcttcgtgctgggcggcggcatcggcatctgcggcgcggccgacatcatcgtggccgcagattgtgcgcgctttggcgtgccggagatcgaccgcggcgccatgggcggcggcgcccacctgcagcgcatgttcggcgtgcagaaggtcagggcgatgtacttcaccggcgagatgatcgatgccgccgaggcgtaccggctgggcgcggtcgagcgcgtggtgccgcgcgcagagttgcgcgaggccgccatgacgctggcccgccagatcgccgccaagagcccggccatgctgcagctggccaaggaagcgctcaacggcgtggaagacggcaacttggaggacaaataccgctgggaacagggcttcacgctgcaggcctacatgagcgccgattccggcgaggcgcgcgccgcctttgtcgaaggccgcgaagcccgctttgcgcagggagagcgcgatgcagcttgaatacaccgacgcccagcgcgccttccgcgccgaggtgcgcgactggatggccgcgcacgtgccgcgcacgccgctggcgagcttcgataccgaagcgggcttcgcccagcaccgcgcgtgggaggccacgctcaaccagggccgctggagcatggtcacgtggccggccgagctgggcgggcgcggctgcgacctgatcgagtggctgatcttcgaggaggagtactggcgtgccggcgcgccgatgcgcgtcaaccagaacggcatcttcctgctcgggcccacgctgatggaattcggcaccgaggcgcagaaggcgcgcttcctgccgcgcatggcctcgggcgagcatgtctgggcgcagggctggtccgagccgagcgcaggctcggacatggccgcgatccgctgcagcgcgatccggcagggcgatgactatgtgatcaacggccagaagatctggtcgacgcgggcggtgtgggcggactggctgttcggcctgttccgcaccgacccggcctcgacccgacaccatggcctgaccttcatcctgatgccgctggacacgcccggcatcatcgtgcgcccgatccgccagctcaacggccagaccggctttgccgagatcttcttcgacgacgtgcgcgtgccggtggaaaaccgcctggccgcagaaggcgccggctggcaggtggccatggccaccgccggcttcgaacgcggcctgatgctgcgctcgccggcgcgcttccaggaaaccgcgcgcgcgctggtcaggctgtaccaggccaaccgcgaggcggcggaccgcgacccgtcgctgcgcgaggcggtgctgcgcgcctggatggacgccgaggcctacacgctgtccacctacgccaccgcgagccgcctggtgcgcggcggccatatcggcgcggagtcgagcacgaacaaggtgttctggtccgagctggacatccatatgcacgataccgcgctggccatcctggggcagtccgcagaggtcgcgcccgacggccagccgccgggttcgctcggccactggctggatggcttcctgttctcgcaggccgggccgatctatgccggcaccaacgagatccagcgcaatatcgtcgccgagcgcctgctcggcatgccgcgcgcatgacggcacccggggaaaacaccatggatttcgcattgaccgaagagcaggagcagtttgccgaggcgatccggcgcttcctgatgaccgagatgacgcccgaactgacgcgcgagctgtgggccaccgagtctggccgctccgacgcgctgtggcgccagcttgccaaccagggcctgaccgcggtgatggtgccgcaggagcagggcggactggggctgggcgaggtcgaatgggcgccgctggcgcaggcctgcggctactttgcgctgcccgagcctttgctggacactgcgctggtcgcggccgggctgctgcgcgatgcgctcgcggcggcgccgaacgcctcggcgcacgaacgctgcgccacgctgctggagcgcatcgccgccggcgatgcccgcgtggcggtggcgcatccgcaagagcggctggtggccgacgcccatgtcgccgacgcgatcctgtgcgcgcacgaaggtgccgtgcacctgctgcggcccgaccaggccgtgctgacggcgcgcaccgggctcgatccttcgcgccgcctgttcgagctggcgtggacgccggccgcggagtccgaactgatcccgtccggtagtggcctgtggagcagcgcgctgaaccgcggcgcgcttggcgtggccgcgcagcagctgggcctgacccagcgcatgctggacctggcgatcgactacagcgcgcagcgcaagcagttcggcaaggccatcggcgcctaccaggcggtcaagcacctgctggccgacgtggcgatccagctcgagttcgcccggccggtgctgctgcgcgccgccgccgcgctggcgcacggcctgcccgatgcgggcctgcatgtctcgcacgcccgcgtggccgccgcgcgctgcgcgtggagcgcggcgcgccaggcgatccaggtgcatggcgcaatgggctacacctgggagctggacctgcagatcttcaccaagcgcgcctgggccctggcgggaagctggggcgaccgtgccttccacaaggcgcgcatgggcgcgcacatccttgacggcgtgcatgagatcggcgccggcgccaccttcgcctgaatccaaagagaaccaagaccatgaaagacgcctatatcgttgatgccctgcgcacgcccaccgggcgccgcaagggcggactgtcgcacatgcacggcgccgacctgggcggcttcgtgctggccgagctggtgcgccgcaacggcattcccgccgaggattatgacgacgtggtgttcggctgcgtcgacaccatcggcccgctggccggcaatatcgcccgcagcgcgtggctggccgccggcctgccgctgacggtgccgggcgtgaccgtggaccgccagtgcggctcgtcgcagcaggccgtgcactttgccgcgcaggcagtgatgagcggcacgcaggacgtggtgatcgccggcggcgtgcagaccatgacccagatcccgatctcgtcggccatgctggccgggcaggcactgggctttgccgacccgttctcgggcagcaagggctggcagacgcgctttggcgatgcgccggtgtcgcagttccatgcggcgcagcgcattgccgatcactggaagctgtcgcgcgaggccatggaagcctacgcgctggcaagccatcagcgcgccgccgcggccatcgaaggcggccgctttgcgcgcgagatcgtgccgtgcgcaggcgtgaagcatgacgagaccccgcgccccgataccacgctggccaggatggctgcgctggaaccgctgatgcccggcagttcgctgactgcggctgtgtccagccagaccgccgatgccgccgccgcgctgctgatcgtctcggaagacgcgctcaagcgctaccagctcaagccgcgtgcgcgcatcgcgcatatgagcgtgctgggcgacgacccgctgtggatgctgaccgcgccgatccctgcaaccagacgcgcactggagcgcagcggcctgcgcctggccgatatcgacgtggtcgagatcaatgaagcgttcgcctcggtggcgatggcatggctggccgaaaccggctacgcggccgagcgcaccaaccccaacggcggcgccatcgcactgggccacccgctgggcgccaccggcgcgcgcctgatgaccacgctgctgcatgagctggaacgcacccgcgggcgctacggcctgcagaccatgtgcgaaggcggtggcctggccaacgtcaccatcatcgaacgcttgtaaggagaccgccatgggaatctgcgacgcacgcaccgtcatcatcaccggcgccggcggcgggctgggccgtgcctatgcgctggccttcgccgccgagggcgccaacgtggtcgtcaacgacatccggcgcgaggcggccgaggccgtctgcgcggagatccgtgcagccggcgcgaaggcaaaagcggcgctggccagcgctgacgacatcacgcagctggccaccgcgcagcgcatcgtcgatgccgcggtcgaggccttcggcgaggtccacgtgctggtcaacaacgccggcatctgccgcgaccgcatgtttgtcagcctgaccgaagcggactgggacgacgtcatgcgcgtgcacctgcgcggccacttctgcctggccaacctgctcgccaaacggtggcgcgatgccgccaaggccggccgcgccgtcgacgcgcgcattatcaacaccagctccggcgcgggcctgcagggttctgtcgggcagtccaactacgccgccgccaaggccggcattgccgcgctcacgctggtgcaggccgccgagctgggccgctatggcatcaccgccaatgcgctggcgccggcggcgcgcaccggcatgaccgaagacgtgttcgccgacatgatgcgggcgccggccgacggcttcgactactacgacccggccaacgtcgcgccgctggtggtgtggctgggcagcgccgcctccgcgcaggtcaacgggcgcatgttcgaggcggccggcggcatggtttccgtggccgacggctggcgcaccggacccaggaccgacaagggatcgcgctggcagccggccgaactgggcgcagccgtggcggaactgctggcgcaggcgcagccgccccagccggtctacggcagctgagcgcgacggccatggacttctcccttagcctcgaacagcagatggtacgcgacagcgcgcgcgactacctcgccgcgcacagcgattcggcggcggtgcggcgcgtgaccgaggcgggcgccgcgcacgacgaagcgctgtggcacgcggtcgcgggcgaactcggctggtgcggcatcgcactgcccgaagccgtgggcggcgccggcctgggggcgcccgggctggtgctgctgcaggaacaactgggccagcgcctggcctgcgtgccgttctggtccgccgtgtgcgtggccgcgccctggcttcaggccagcctgggcccgcgcggcagcgcgcattggctggaacggctggcgtgtggcgagctgcgtgccgccgcggtgttgccggacgatggcggctggcagtacgacggcgtcgccattggcgcgcaggcgggcgcggatggcttcgtgctgcgcggctgcgccgcccaggtggccgatgccgccggcgccgactggctgctggtgccggcccggctcgaagacggcgtgcctgcgctgttcctgctggagccagcagcactggcacaggatgcgcgaatcatgctggcgccgctcgatacgctggaccgcacgcggccgcaggccgcgctgcggctggacgggctgcccgtgcccgccagcgcctgcctggcgcgcgcggacgcggcggcgtttggcctggcccaggcctggtggcacggcaagctgatgctggcggcggagcagcttggcgcggcccagcaatgcctggacctgaccgtagcttatgcctcggaacggatccagttcgggcgcgccatcgcctcgttccaggcggtcaagcaccgctgcgcgcagatgatggtgctggtcgaggcggcgcgctcggcggtgtatggcgcggcgcaggcgtgggaaacgggcgaggtggccgatggtaccggcatccgcctcgacatcgccgccgcatccgtggcagccgacgatgccctgcgcttctgcgcgcaggaggccatccagttgcatggcggtgtcggcttcacctgggaatacgacccccagctctatttcaagcgcgcgcaggccgccagccactggctgggcggtgccggcgcggcgctggcgtatctcgcagcaaatggcccgaacgcgtggaggacagcatgacagcgaatcaagaggcggcattccgcgccgaagtcgcgcagtggatggccgccaacctggccggcgagttcgcctgcctgaagcaccgcggcggccccggcgacgaagaggcctatcccgaactgcgcaaggcgtgggagcgccggctggccgaaggcggctggaccggcctgggctggccgcgcgcgcatggcgggcgcgagctgccggtcatgcagcaggtgatcttccatgaggaatacgcgcgggcaggggggccgggccgcatgggccatatcggcgaggggctgatcggcccgaccctggtcgccttcggcaccgacgaccagaaggcgcgcttgctgcccggcatcctgaacggcaccacgttctggtgccaggggtattcggagcctggcgcgggctcggacctggccaatgtgcgcacgcgggcggagcgcgatgcggccaccggcgactggctggtgagcggccagaaggtgtggacctcgctcgcgcacgattcggactggatcttcgtgctggcgcgctgcgagcccggctcgcgcggcagcaagggcctggtcttcctgatgctgccgctggaccagcccggcatcgagatccggccgattcgccagatgggcggcggcgccgaattcaacgaggtgttcttcgacggcgcacgtgccgccgccgccgatgtgctgggcgcgcccggcgatggctggcgcatcgccatggcgctgctgggcttcgagcgcggcatctccacgctgggccagcagatgcagttcacgcacgaactggaatgggtggcgcaggccgcgcgcgacaacggcagcagccgcgacgcgctggtgcgccagcgcatcgcgcgcgcctgggccggcctgcgcgtgatgcgcgccaatgcgctgcgcatgctggcgggcgcggcgcaggcgggccaggacggcggcaccgcgctgcagcgcgacgcgctgatctacaagtactactggtccaactggcaccgagacctgggccagctggcgctggacgtgctgggtccgctggccaatgtgctggacgccggcgacacgcgccgcacgcggctgcagcagatggcgctgttctcgcgcgccgacaccatctacgccggcaccaacgaaatccagctcaacatcatcgccgaacgcggcctcggcatgccgcgcgaagcacgaggacagtcatgaccctgaacaccgaaatccccagcggcccggcctatgtgcctggccatcagttgctcgccggcaagagtgtgctcatcaccgccgcggcgggcgccggcatcggctttgccgccgcgcgccgctgcgccgaggagggctgccgcgcgctgatgatctccgacgtccatgagaagcgcctggccgaagcggtcgggcgcctgcgcgcggaaaccggcctgcaggcgatccatggccagctttgcgatgtatcggatgaagcgcaggtgcgcgcacttgtggccgccgccgaagaagccttgggcggaaccgacgtgctgatcaacaacgccggcctgggcggctcgcgccgcctagttgatatggacgatgccgagtggtcgcgcgtgatcgatatttccctcacgggcaccttccgcatgacgcgagcgatgttgccgcacatgcaggcgcgccggcgcggcgccatcgtcaacaacgcctcggtgctgggctggcgtgcgcagaaggagcagtcgcactacgccgcggccaaggccggggtgatggcgctgacgcgctgcagcgcgatggaagccgccgaatttggcgtgcgcatcaatgcggtggcgcccagcatcgcgctgcatgacttcctgaagaagtcggcgccggccgacctgctgcgccagctcagcgagcgcgaagcgttcgggcgcgcggccgaggtgtgggaggtggccaatgtgatggtattcctggccagcgactatgcctcgtacatgacgggcgaggtgctgccggtgagcagccagcgggcttgaagggaaacagttgggaccgggaacaacgcaggaaccagacatgccaagaatcttccgttctgccgaagacatccacgccgccgtcggccagcgcctcggcgagagcgcctggacccagatcacccaggaacaggtcaaccagttcgccaatgccactggcgaccaccagtggctgcacgtggacccggagcgcgccgcgcagggcccatacggcgcctgcatcgcgcacggctacctgacgctggcgctggtcaaccagttcctgccggagctggtcacggtcgaaggcatgaagtggggcgtcaactacggctgcgacaaggtgcgcttcccggcgccggtgcgcgtgggcgcgcgcgtgcgcggggtgggggaactggtgcgggccgagaccttgcagggcggcgtgcagtcggtggtgcgcatgaccgtggaaatcgaaggcggagacaagccggcctgcgtggccgagaccatcagccgctattacttctgaacaggaatccagaatgaaagaagcagtcattgtcgccgtcgcgcgcacaccgatcggcaaggccttccgcggtgccttcaacgacaccgaggccccggtgctgggcggccacgtggtgcgcgcggtggtggagcgcgccggcgtggatccgtccgaggtggaagatgtgctgatcggcgcggccgcgcagcagggcacccagggctacaacctgggccgcctgtgcgctgtggcggccggcctgccggacagcgtgcccggcatgaccatggaccgtatgtgcggctcgggcctgatgacgatcgctgcgggcgcccgcgcgatccagtgcggcgaggccgacatcatcatcgccggcggcgcggaatctatctcgctgacgcagaccaggcacaagaacagctaccgcgcccagtccgaagcggtgctggcgcggcagccggcagcctatatggcaatgatcgagaccgccgaggtggtggcgcgccgctatggcatcagccgcgccgagcaggacgcctacgcctggcgcagccagcagcgcaccgccgaggcgcagcggcgcggtgccttcgatgacgagatcgtgccgctggaaacgcgccgcgcgctgttcgacaaggccggcacgctgaccggccacgagaccgttcggcttgcgcacgacgagtgcaaccggcccgataccacggccagcagcctggaggcgctgaagccggtctggagcggcggccaggcggtggccgccggcgagcacatcactgccggcaatgcctcgcagttgtcggacggcgccgccgcggtgctgatgatgagtgccgacgaggcccgccggcgcggcctgcgcccgctgggccgctaccgcggcatggcggtggcgggctgcgcgccggacgagatggggatcggcccggtattcgccgtacccaggctgctcgcgcgccatggcatgacggtggccgacgtgggcctgtgggagctgaacgaggcctttgcctgccaggtgctgtactgccagcagaagctgggcatcccggatgcgcgcctgaatgtcaacggcggcgcgatctcgatcggccatccgttcggcatgtcgggtgcgcgcatgaccgcgcatgcattgattgaaggccggcgccgcggcgtgcagcaggcagtggtgaccatgtgcatcggtggcggcatgggtgccgccgcgctgttcgacgttctgtaattacaagcagcccctgcagggacggcccgcaacgaggccgcctgccatcactccaaccggaggagacatcatgaaacgactgatcggcgtcgccatgtcgctggccgtgctggccaccgcggtatgggccttcgcgccgcgcccgctgccgccgttcgcggccacgacgctgcgcccggacggcctgcaggtcaacggcatcgcgcgcgccggcgagcgcctggtggcagtgggcgagcgcggccagatcctgttcagcgacgaccagggcggcaactggcgcacggccgtggtggatcatccgcaaggcgccgcgctgacccaggtggcctttgccgacagccgccacggcatggcggtcgggcacagcggctggatcttgcgcacggaagacggcggtgcgcactggcagcaggtggcgttcgacgcgagctcgtccgatccgctgctcggcgcctgggcccaggcgggcggcccgtggttcgcggtcggcagctttggccgcttcctggtctcgcgcgaccagggcaggcactgggagccggccgcagacaaggccatgcaggaccgccacctcaacggcattgccggcgacgggcaggggcgcctgatgctggtcggcgaaaccggcctggtgctgcgctcgcccgacggcggcagccgctgggaggtggtgaagtccccctacgagggatcgctgtacggcgtgcagccgctgcgcgatggcgcctggctggccttcggcatgcgcggcaacgccttgcgcagcgaggacttcggcgccacctggcaggccgcggacactggcctcaagacctcgttcttcggcggcgtcgagctgcccgatgggcgcatcgtgctggccgggcagggtggcacgatggtgatgtccgccgacggcgggcgccacttcaccgccctgcccgccggcagcccgcagaccctggccgcgctggcccctgccggcaaggacaagctggcgctgggcggcaatggcggccttgccggcgccacgctcgccgccaacccccgctgaccctggcttaccgaatgcgagaacgatcatgacccgcccccattcctccggccgcctgggccgccttgtcgatgcctgcgccagcctgctgatgcaccggcgccgcctgctgctggtgctgtgcctggccgtgaccgtggcgctgggcgcctcggccacgcggctgcggctcgatcccggcttcaacaagatgatcccgctgcagcacccgttcatgcaggtgttcaccaagtacgcgagcaccttttccggtgccaatacggtgctgctgagcctgcgctggaagggcgacggcgatatctacaacgcggccttcatggacaagctgcgccgcgccaccgatgacgtgttcttcatccccggcgtggaccgctcgcgcgtgttctcgctgttcacgcccaatgtgcgctacaccgaggtgacggaggcgggctttcgcggcgacgtggtggtgccggggcgcttctccggcacgccggccgagctcgacaaggtgcgccgcaacgtggcgcgctccggccagatcggccgcctggtcagcaacgacctgaggtccgcgctgatccgcgcggaattgcgcgagaccgatccggccaccggcaagaccatcgactacggttcggtcgcgcgccagctggagaagatccgcggggacttcagcggcaccgacgtcgaggtcaatatcgtcggctttgccaagctggtgggcgatgtggaagagggcatcgccggcgtgatgggcttcttcgcgctggccttcgccgtgaccgcgctgctgctgtggctgtacacgcgctcgctgcgtatcacgctgctgtcgctggcggtggcgctgctgcccgtggcctggctgctgggcctgctgccgctgctgggctacggcatcgatccgatgtcgatcctggtgccgttcctgatcttttcgatcggggtctcgcacgcggtgcagatgaccaatgcctggaagcaagaggtggtgcagggacatggtgcgctggacagcgccagcgcggccttccgcaagctgttcatccccggcacggtcgcgctgctgaccaacgcgctcgggttcatggtcatcatgcgcatcgagatcgacatcgtgcgcgagcttggcatcaccgcctgcctgggcgtgctgctgatgatcgtgaccaacaaggtgttcctgccgatcctgctgtcgtacacgcggctggagccgtcggcgctggcatcggcgcaggcccggcgcgcgcacggaaccggcgggctgtggcagaagttcggcgcgctggcgcgtccgggcccggcgctgggcgtgttcgttgccgcgctcgcgttgctggcggccggcgccatcgattcgcgcggcctcaagattggcgatgtcggcagcggcgcaccggaactgcgcgcggattcgcgctacaaccgcgacagcgccagcatcgtgagccagtacaacatcggctcggatgcgctgaccgtggtggtggaacccaccggcttcgacgacggctgcctgcactacccggtgatgagtgcggtggaacgcttcgagatgcatatgcgcggcgtgtccggcgtgcagtcggtggtgagcgtgtcgtcgctggccaaggtggtgatcggcgcctacaacgagggcaacccgcgctgggaggcgctgccgcgcagcagcgagggcctgagccagggcgccaaggccttcgacccggacaacggcatgaatacctcgaactgccaggccatccaggtgctgatctacaccgccaaccatgagggcgccaccatcgcccacatcatccgcgagatccgccgcttcaccgccgccgacaagacccccaacgtggcgttccgcctgggcgggggcaatatcggcgtgatggcggccaccaatgaggccgtggaagaagccgaagtgaccatgctgctgtcgatcttcggtgcgatcacgctgctatgcctgctgacgttccgctcgtggcgcgcggtgctgtgcatcatcgtgccgctgacgctggtgtcggtgctgtgcaatgcgctgatggcgcggcttggcatcgggctgaaggtgtcgacgctgccggtcatcacgctgggcgtgggcgtcggcgtggactacggcatctacctgtatgagcgcatccagcaccagatccgcgaggaagggcaggccctgccgcaggcctttgccgaggccatgcgccagcgcggttcggcggcgctgttcacggcgctgacgatgtgcatcggggtgggcacctgggcctttgccgcgctcaagttccaggccgacatgggtatcctgctggccttcatgttcctggtgaacctgttcggcgcggtgtcgctgctgccggcgctggctgcgtggctgggggtggaggaagaagagcgtgcgcgcgtggccgccggtggtgccggtggcgccgcgcgcggcgagacggtgccgccggcgcacgccctgaaatccgacgcggtgtaaggccgatgacccggagagacagcatgcacgatcaccaggcttacgcggcggcggcattcacaccggtccgcatcggcccgctcacgctgcgcaatcgcattatcaaggccggcgccaacgagggcatgacgccgcagggcctgccgaccgaggcgctggtcaggcaccaccgcgagcttgccgcgggcggcgtgggcatgaccacggtggcgtatgcggcggtggccgacgacggcctgactttttcgcaccagctcagtatgcgcccggagcaggttgcgcacctgcgcgtgctgaccgatgccgtgcatcgcgaaggcgcggcggcctgcctgcagatcacccatgcgggctcgttcaccaccatgcgccatggcggcagccgcgcgccgggcagtgcttcatccggactcaatgcctttggcatgctgcatggcgtgtatttccagcgtgccatgcgcgaggcggacatggcgcgcgttgccggccagtttgccgccgcggcgcggctggcgcgcgaagccggcttcgacgcggtggaaatccacatggggcacggctacctgctcaaccagttcctgtcgccactgagcaaccgtcggcgcgatgcgttcggcggcagcgtggagaaccgcacccgctttccggccgcggtactgcgccaggtgaaggacgcggtcggcgccgagctggcggtctgctgcaagctgagcgtcagcgacggcgtgccgggcggcaacgaacccgcggattccgccgtgagcgcgcgcctgctggaggcggaaggcgccgacctgctgaccctcagcggcgggcgcaacgtcgagagcccgtgggcgctgttcggcagccccatgcccacggcgcagatgaaggccgccgcaccgaccgcggtggcgcgcttcggcatcaccatgctggagaagcgcacgccgcgcgcgctggcctttcgcgagctgtacttcctggaggcgtcgcgcgtggtgcggcgggcggtgcgcatgccgctggcctatatcggcggcgtcaagtcgatcggcaatgtcgcgcagctgatggaagagggcttcgactgcatcgcgctggcgcgcgcgctgatccacgatcccgcactggtcgccaactggcgcagcggcgcggtggcgcattcggcctgtgacagctgcaatggctgcgtggcgcggatctacgatccggccggtgtcagttgcgtgcatggcccgggcaatgacccggcgctgacgaagattgccgcgctgcagtagtccgatgggacgatgagccgccggccagacgctcttatcttgaaggtcccacgggaattcaaggagacagacgccatgaccgctgacggcaaccagactggctacaagaccggctacaagatcgaatcacgcccgctcgaggcccgctacgcgcgcggctggcattgcctcggcctggccgatggctaccgcgacggcgtgccgcacacgctgaatatcttcggccggcgcctggcggcgtttgccgactcgaccggcgcgattcgcgtgatcgacggctactgtccgcacatgggcgcagacctgagcaccggcaccgtgcagggcgacaacctggtctgcccgttccacggctggcagtggggcggcgacggcggctgcaagtccattccctactgcaagcgggtgccgcccaaggcccgcgtcggcgcctgggagacctgcgagcagaaccacctgctcttcatctggcacgatcccgaaggccgcccggcacccctcgaggtggcgattccgcgcatcgatgcctgcttctcttcggattggtcggactgggccatcgacgagatgctgatccgcaccaattgccgcgagctggtcgacaatatctccgacatggcgcatttcggcacggtccatggcgcgccggtggactattttgccaacctgttcgaagaccacaaggccacgcagctgatgatcgggcgcagtgcccggctctcgggcgatgcgcagctgacggcgctgtccacgtacttcgggcccgcataccacatcaccgagatgatcggacagatgggcgaccagcagatccactcgatcctgctcaactgccatgtgccgatcgacctcaacagcttcgcgctgcgctacggcgtgttggtgaagaagatcccggggctgtccgaggaacagaaccgtgccatggcgcaagcctatgtggagcaggccaaacaggccttctacgaggacgtggcgatctgggacagcaagatccgcatcgacaacccgttgctgtgcgaaggcgacgggcccctctaccagatgcgtgactggtaccagcagttctacaccgacgtggagcaggtgcggccgtccagcgtggcacggcgcatctttgagctgaacccgggcaatatcgaaccgccggcgctgcggcatgtgttcgaggcctgatggcaacctccacggaacctcgcaccatgaaaaccgtcgtcattaccggagccgcgtccggtatgggcgcggccgtgcgccagcgcatgctcgccgacggctgccgggtcatcggcatcgacctgcgcgatgccgacatcgttgccgacctgtccagcccgcagggccgcgctgccgcgatcgacgccgtactgtcgcggtcaggcggccgcatcgaccggctggtctgctgcgccggcctgggcccgcatgtcgaacccgcaacgctggtggcatcggtcaactacttcggcttggtagcactgctggatggcctgttcgaggcgctgcgccagggctcggatccgtgcgccgtggtggtgtcgtccaactcggccacgctccagtcctgggagggcagcccgctgcgtgatgcctaccttgccggcgatgagccaggcgtgtgcacgatggtggcggccgccgcggcggcggaagccacccgggaccaggctggctatatcgcctatgccagttccaagcatgcggtggcggcggccgcgcggcaacgtgcggccgcgtggggacaggccggcgtgcgcctcaacgtggtcgcgccgggggcggtggaaacgccgctgctgcaggccgggctgaaggatccgcgctatggcgatgccattcgcgatttcctgccgccgcttgggcgccgcgcccagcctgaagaggtggccgcgctgatcgcgttcctgtgcgggccgcacgctgcctacatccatggcaacgtggtgttcatcgacggcggcctggatgccgcgcagcgaccgctgaacttctgatctcctggccaatggggcatccgccgcgagccgcggcggatgccccatttttgttcgatggcgctccggacttacgtgaccatgacatcgtcctgcatccggcgctcgcgttcgccgggatacagggccttcatttcgaggtagaagcactcggcgcagcccgggttgcaatcggagcggctgggctttgccatgtaaaaacccccaaaagtcgtctccgacttctgggggcagttcagggcggggaggggagcgcgaccgggcgccaaaggctgcgcccggccggatatcacgatgggatcaggtacccgacccgcgcgcggcgtccggggagaagaacgcctcgttgaattccgggctgttgttcagcgttgccatcgggccttcgttggtcaggcggtcggccatgtaggcacccgaaatcaggtcatggtagaacaccgtggtcggatagtagcggcgtgcatcataggcgtacaccgaggcctggagattggtgcgccacaactggccccggccatcgtagttgtcggccgccagggccagccagctgtcttcgtcgagatacagcacgcgtttcgcatactggtgccggaaaccggacttgagcgtggcttccagtacccatacccgatgcggttcatagcgcatcgcgtccggattggcatggccattcgtgagcagctccttgtacttgacggaagtgctctgcagcttgtaattgtggtacgggacgaagatctctttcttgccgacgatcttccagttgtagcgttcgcccgagccgttgaagaggcggtcgtcgtccacggtgcggaagccgccgggaccctggggctggtcaaagccgaattccggcgcctggcgcacccgccgcgtgcccgggttgtagatccacgtgcggttggtgtcggaaccctcctggtcccagaccgcgtagccaacgatcacctggccgcggtcacgcaacggcaggtcggtggcggtgcggaagaaggagcgctcgttgagggcgctgcgcgggtcgaacttgccattgttgcgcggcgacaggatgctgtacgagacgcgcccccacgcgatcgagccgttcggatacaccacggcctggtcgaactgagccttctcggtgccgatggccgacgagaaacgctggttccacaacagctccatcgcggttttcggaatcgggtagggaacctgcggacccgcttccttcaggccgttggcatcgctcgtcatgctgacggtggtggcgtaggtgcggatgtccttgtagaccgcgtcctcgtagcggaaatcgcgatggcttgggtacaccggcatcttgaaggtgtcgggatacttcttgaacagcgccttctgcccgtcgctaagccgctcggcatactgcgccatgttctgcgccgtgatgacgaacagcggcttctcatcggcatacgggtccgggtagcgttcgccgcgctggtatttgacatgcgccggcgtgcccagccacttgccggaccatgccgggacctcgccgtccttgctggcggcacgctcggcgcccatcggcgtgagggggccatccagttgcttgagctcctccggggtggccttcgcccacgatgccgccgccagggccatgctggtgagcagcaggccaccgcgtatcagttgtcttgtgctggatttcattgaagtctcgctccttgtaaagaggaattgccggcgccggctgtgcctgtgcctgtggtgacagcgtagtgatggcgcggcggcggggaatcgttggaacggactagtggatttccctagcgcccggcgtggcggagggggcggggacaatccgggtggcgtgccagcatcccgcgaggattgcgggagcgtaccggggtggtacgggaaggggggcgggggtagggggacttaaacggcgcgaggccgggcaagtgcccggcctcgcgcgccagcatgcggccagcggccgcagccagggtcaggcttccatcacttcgccgaagcgctgcaggtggtagtcgctgtcgcccagcaactggtccagcatggtcaggcgcttgaagtagtcgcccacggacagctcatcggtcatgcccatgccgccatgcagctgcacggcctgctggccgacgaagcgcccggcgcgggccagcgtcaccttggccgcggacagcatgcggcggcgcgcggcgggatcggcctcgtccagcgcctggactgcgacgtaggccatcgacagtgccagctccttctgcaccagcatgtcggccatgcggtgctgcagtgcctggaagctggccagcggcttgccgaactgctggcgcgtgcccaggtactcggcggtgatctcgatcagcttttccatggcgccggcgccctcggcgcacagcgcggcaacgccgtgctcaaggcccacgcccagcgcggccaggccgtcggcgggctggcccaccagcgcgttggccggcaccgtcacgtcctgcagcgacaggtcggcggcgcgcaggccgtcgacggtcgggtaggcggtgacgcccaggcccttgctgtcgcgcggcaccaggaacaacgcaatctcattgctgccggccacgcgcgcggtcagcaggtaggcgtcggcggcggcgccgtgccagaccacgctcttgatgccgttgagcacgtagccgtcgccgctgcgctcggcgctggcgcgggccgattccgggcggtagcgggtggtcggctccaggtaggccagcgtgacgatgcgctcgcccgaggcgatcgcgggcagccattgttccttctgcgcggcgctgccgtgggcggccaggatggccgcggccatcacgccgctgggcgtgaccggctccagcaccaggccgcggcccagttcgcgctgcaccaccagctggctggcggggccttcgccgaagccgccgaagtcggccggcacggtcaggcccagcacgcccatttcagcgagcttgttccacacgccgcgatccaggctctcgcctgcgcgcgcgctcttgcggcgggcctcgaacgtgtattcggtatcgatgaagcgacgcaggctgtccgccagcatctgttgctcttcgctgtaggtgaagtccatgtcagctatcccttcagaaacccaggatcatcttggagatgatgttcttctgcacttcggtcgcgccgccgtagatcgaggtcttgcgcatgtcgtagtaggtggaggcggcaggggcggcccagtcggggcccgccaccggctgcgtcgcgcccggctcaagccagtccggcgaatacggccaggcgttggggccggccacttccatcatcagcatgcccaggtcctgctgcacctcggagccgcggatcttgacgatcgaggcctcggggccgggggtgccggcggcctgcgtggcgacgcgaagcagcagcatttccagcgccatgatgtccatctcgacgcgggcgatcttgtcgcgcatgcgcacgtcttcgatcagcgggcggccggcgccgtcggtggcctggctggcgtagtgcttgagcaggcgcagctcgcggtggcagtggccgatgccggcaatgccggtgcgctcatggccgagcaggtacttggcataggtccaggcgcggttctcttcgccgaccaggttcccgaccggcacttccacgtcttcgaaccaggtctcgttgacgtcatggccgccgtcgagcgtcttgatcgggcgcaccgtcacgccgggcgacttcatgtcgatcagcagcatcgagatgccttcctgggccttggcctccgggtcggtgcgcaccaggcagaagatccagtcggcaaagtgggccatggtggtccaggtcttctggccgttgacgatgtacttgtcgcccttgcgcaccgcgcgcgtcttcagcgaggccaggtcggaacccgagcccggctcggagtagccctggcaccagaagtcgtcgatattggggatgcgcggcaggaagcgctgctgcatctcggggctggcgtacttcatcagcaccggcccgatcatggtcaggccgaacggcagcaggcgcggcgcgccggcgcggaaggtctcgatctcgaagatcaggcgctgcagcgcggtccagccggtgccgccccattgcctgggccaggtcggcgcaccccagccgcgcgcctgcaggatgcggtgccagcggatgtagtcgtccttttccacgcgctggtggttgagaaccttgttgcggatgtcttccggcaggctggcctgcgcgaatgcgcggacctcctcgcggaaggcctgttcctcggcggtgaaacgcaaatccatctgaatgtcccctgtggtacgcgggccgcgcggcgcttcttgccctgcctggttgtgcagtgcgtcaaagcggcggccctcactgtgccggccgattgtaggggccgggcgcgattctttgcttcatcaatgataaagccgtccttcgtggaggcggaaccacctgcgccgggtggtggcggggcgaactgcggctggccagtggcgttgacgaacacggccttagtgaattccaaatggctgcggcacggggcttgcagcaaactgatgcagccagtttcatgtggccgggtgtattccgccgcatatccgagtcagcctgcatcgagagacccaccagcaccatgtcttccttccgccccgaatacatccacgacatcccccgctactgggccgcgcagacgcccgacgcgccgtgcctgcacgagaacggcgccgtcatcagctacggcgagctgtggcggcgcatcgaggccgcccgcgactggctggcggcgcggggcgtgggcgagggcgaccgcgtgatggtggtcggcgagaactgcaacgagatggtggtcacgctgttcgccagcagcctgctgcatgcctggccgatccaggtcaatgcgcgcctgtccgcgcgcgagatcgacaatatccgcgatcatgcgcagccggcgctggtgctgttcaccggccatgtctccgacgtggccgcggcgcacggcgagcggctgggcgcacaggccaccggctgcccggtgttcgacgctggcatgcgggtggtgcgcgcggccaccgcgccgcagcgcgagccggccgggctggcccgcagcgtcgccacgctgatctatacctccggcaccaccggcgcgcccaagggcgtgatggtgccgcatgcgggcctgacccagtttgcgcgcatctctgccacctcgcgcgacatgggcccggccgacgtggcctacggcgccttgccgatgtcgcatatcttcggcattgccacggtgctgatggccacgctgtatgcgggcgccagcctgttcctgcgcccgcgcttcgacgccaatgaagtgttcgagtcgctggcatcgcccggcgtcaccatcctgcagggcgtgccgaccatgttcacgcgcatcatggcggtggcgcccaccgtcggcgcgaagcccggcgcctatccgcgcctgcgctacctctataccggcggcgcgccgctggaccccacgctcaagcgcgaggtcgaaaccctgttcggccaggcgctgcaccatggctacggcatcaccgaatacgccggctcgctcttcatcacgcgcatggaagccccgcgcgccgactgctcggccggctatatcgtcgaaggcgtcgagatcgagatcaccgatgccgaaggcaagctgcttcccgccggcgagcgcggccagatccgcgtgcgcggcccgggcgtgatgctgggctactaccgcaaccccgagcagaccgccgaggcgctgctgcccggcggctggctcaataccggcgacctgggctacctggatgccgacggcgcgctgtttatctccggccgctccaaggacctgatcatccgctccggcttcaacgtctacccgatcgaggtcgagtctgtgatcaatgccttcccgggcgtgcgccagtcggccgtggtcggacgcaccaccggcgacggcaacgaggaagtggtggccttcattgaaatgcaggacggcgccgagcttgaccgcaaggcgctggacacctacctgcgcgagagcctggccccgtacaagcgcccggccgaggtccgcaccgtcgacgtgattccgaccacggcgagcggcaagctgctcaagcagccgctgcgcgccatgctcgattaagcgcccgccgggcccgccggccccgggcaatatcagccatacctggaggagacaataatgaagacacggacgacactggcagccctgaccgccacgctgctgctgcagggcgcggcgtgggccgccgacgcctacccgtcgcggccgatcaagctgctggtgggttacgcgcccggcggcccggtcgacacagccgcgcgcatctatgccgagcaactcgggcgcgtgctcaagcagccggtggtggtggataaccgcgcgggcgccagcggcgcgatcgccgccgacatgaccgccaaggcggcgccggacggctacacgctgtatttcgtcgccagcccgaccatgaccatgacgccgctgatccagcactcggtcaatttcaatccggtcaaggactttacctacatcggcctgatcaccgattacaccaacgtgctgctggtgaacaaggacttcccggcgaagaacgtgggcgagctggtcgactatgcgcgcaagcatcctgagggggtctcgttcggctcggccggcattggggcatcgaaccacctgtccgcggaattgctggctcaaatgaacagcgtgaagatgctgcatgtgccgtacaagggcaatgcgccggccatggctgacgtgatgagcggcaaggtcacgttcatgttcgatattaccggcacggccatcgggcatatcaatggcggcaaggtgcgggcgctggcggtcacgtcgaagactcgcaacccggcgctgccgaacgtgccgaccatgatcgagtcggggcagaaggactatgacctgaccggctggtatgcgctggtggggccgcagaagctgccggccgatgtggtggacaagctggtcaaggcgcagaaggcggttggggaggatgctgctttccggcaacggatgacggctggggggtatgacgtgaatatcagcacgccgaaggcgctgggagatcggattcagcgggagctggcgctttggggtggggtggtgaaggcggcgaagattcaggcggattgaggggggaggggcttgggggctggttcgatgttgttgtaggtcgacggccctgttccgccctgctgggcgggtcactttctgtccgagcgacagaaagcgactcgcccctttaggggcgaaaccggggcctctccaagagccaccaccacaaatctgccgaaataccttcttgaatgccatcaaggcatcgcctgtgagccgtgatgcgtgccttcgccaaggcgtggagttctccgctctgtggatgtcggcaactgacgctcaacttagcgtatcgatccttcacaatctgcgccttgattgtgaacggcagggttctctagactggatgggctgctaatacagcaggagccgggagtgagaacccgatcaacgttacctcctcttctacgctatggaggtcagcaatgtcccaatccggcattgaacccgacgccttcaccccgccccgactcgatgattccctttcgcggttcagtcccgaaacccgccgcgcagcgcgtgaggacgcgctgcctgttcctcggcaactcttgctattgaatctcttggatcaagccgatgcggttgcgcgaggcacggcctgcgtactgacgttggttacgcacagcgaatgtgacgcacaggaagaggggagcgtagccttgcagccggttacgttggagccttgcgagcgctctgccgggcctcccttggattgctggccgacagggtagaagaagtcgcggagggaattgaggaggcgatggtcgggtaaccaatcgcggtcggtcgctgattcactgagatggcaggtcccgctggtgtcaattgtgggcaccgcaggacttgaccgaccgtttgtgtgccccctctcccgcaagcgggagaggggagcaaaccagcggagcagataaggcttcaggctcttaaccttccacttccgcccacccctgcatcgcctgcccgccggcatcgtcccccgtccacagcaccagccgcccagcctgcgccggatcagccgcgccgccaacgatgatggtgtcctggtcgaacagcggcgccaggccgcggaagccaaagcggcgcacgcgcgcctgcggttgctcgcgcgccaccaggtccagcatcagcatggcctgcatcggcccgtgcaccaccaggccggggtagccctcgacctcgcgcgtgtactggcggtcatagtggatgcggtggccgttgaaggtcagtgccgagtagcggaacagcatcaccggatctgcctgcagcgtgcgctgccactgcgcggcctgctccaggcgcgggcgcggcggctgcggcctggacgggtcgggcatggcgcggtagacgatatcgtggcgctcgttgaccgcggtcttgccgttgacggtcagctcgtgatcgacggcgacaaaccacagttcaccggtgcgcccggtcttgtactgcacgtccttgatggtggaggtgcgcgtgacggtatcgccgatatgcagtggatggctgaagctcagttcgctgccggcccacatgcggcgcggcagcggcaccggcggcatgaagccgccgagggtgggatggccgtcgcgtcccagttcacgctgcggcgcgcgcggcaggaagtagagccagtgccacagcggcggcagcgggccggcggcgacggcctcggggtcgaggtcgaaggtggcggcgaggccgatcaccggttccggcgacagcgtttcggtgcgcgattcgctgcggccgatccagccgcgcaggcgttcgagttcaggagtggcgtcagtcatgacagtaagccttgtaatgcgtgaaagtggccggaaggcgggttattgcgccagtgccagcagccggcgggcctgctcgatcacgggccggtccaccatcttgccatcgacctgcaccgcatggctgccgctggcggtagcttccagcacacggcgggcccagtcgagctgctcggggctgggcaggaagcctgcgcgcgccgcgcccagctgggccgggtggatgcagagcttgccggcaaagccgagttcgcgcgcataggcaacgtcgctggccagcacggcttcgtctttcagtgcggtggtcacgccgtcgaccggcggcggcagcccggccacgcgtgaggccagcacgatgcgcgcgcgtgcaaaggcgagcgcgtcgcgcgtatggctgcagcccaggtcgaccgcatagtcgagcgagccgaaggcaagacgtgccacgccggtggcggtggccacggcgtcgatctgatgcaggcccagcgcggtttcgatgatcgcgaccagttcgccctgcgggttgatcgagtgcagggcctgcgcgatggtggccagcgcggcggcatcttctgccttgggcaccagcaggcctgccagcgcggtacccgggggcagcgcgcgcagccaggccaggtcggcggcaaaggacggcgaggcgctgtcgttgatgcggacaaaggcattggccgcgggcagtccggccagccacgcggcgatggctgcgcgcgcggcgggcttggcgtccggatggaccgcgtcctcgaggtccaggatcatcacatcggggccggcggcagcggccttgtcgaagcgttccggccggtcgcccggcacgaacaggtaggtgactgcagtggacatgtcttggtcctcagcctgcggcgggcagccagtcgttgacgttcggggcctgctccagcgcccacacgcgctggatgatggcgcgcatctcggcctcgctcgcgccgtggcggaacgcgcccagctgcagcgccttcgcttccagttccgggcgcgacagcgtgttgtcgggatcgcccttgggcacgtcgacgcgcgccgccagtgtgcggccgtcggtggtcgtgacggtaacgcggccgatccactggcgcgggtaggcggcgttgatctcggcatccagttccatgccgaccttgccgcggaaggcggtcaccttcgggtcctgcagcgcatgctgctcgaactcgcccagacccgcatggccgtgcacggccaccagccccagcaccgtgcccatcgagaacttggcctggtggatggtggtggggttgaccaccgggccgagcacgtcgatggcgccctggtgcacgtgcgtggtgacgctggcgacctggtcggcgccgatgccttcgcgctgcatcagcgccttgagcgcatcggcggccgggtgcgtgtggcggcatgaggcgaagaacttgaacgaggtctcggcggtggcccagcgcgtgcccaggccgtcggtcaggcaggcggggttggcatcgctggacatgccggcggccatgccctgcgcgccttccaggatctgcttcgcgccggtgaagccggcgcgcgcgagccaggctgactgcaggccatcggccgcggccttggcggtatgcagctgcttggagtcggcggcgtcgcgcaggaattcccacaggcccgcggcctgcgtgccggccgagcccagtgcctggttgatgccttcggcatcgaggccgtagagcttggccacggccgcggcggcggccagcgtgcccaccgtgccggtggtgtggaacacgcggtagtgcgaacggcccatgaattcgccgatgcggatgccggcctcatagccggcgatcgaggccagcagcacttcggcgccggtcttgccctcggtctgcgcggctgccaccacggcagggaacaccaccgcggccgggtgcagcaccgagccgttgtgcacgtcgtcctgctcgaccacgtgcgaggaggcgccgttgatcagcgcggcaaagtagggcgaggtgcggcggcggtccaccagcacttcggcgccgccttggtccgggcccatggccgcggcgaactcctgcagcttgcgcacggcgggggcatccttgccggcgatggccgaggcgatccagtccaggaacaggtccttggtgcgctcgatcacgggcgcgggcacgtcggccagcttgaggtcggccaggaagtcgcaaagctggcgggtggggtaggtggtgtctgcgggttggctcatgcaggctccgatgcggattgggtttcgtggaggaggaaaaagcccggcgctctgtgcgagatggccgggcgtcgtgtgttcagatggtccgcttgtcagccagcgcggcgatatcgccgtcgtcatagccgagctcggccaggatctgccggctgtgcgcgcccagtgccggtacgtcgcccatgacaggctccacgcccgacaggttggcgggcggcagcagcgcgccgatcggaccgcccggggtggccacttcgcgccagcgctggcgtgcctgcaactgcggatggttccatacgccctcgatgtcgttcatcggggcattggcgatctgcgcctcgtcgagcagtgcctcggcctgcgccacagtcatcggcgcgaagcgctcttcgatgatggcggtgagttcggggcgattgtgcacacgggccgtattgctggagaagcgttcgtcctgcgccagttcccggttgccgagcacgatctcgcagaaattggcgaactcgcgttcgttctgcacgctgaagatcacgctgccattgccggtgcgatgcacgccatacggggcgatggtcggatgcgaagcgccgaagcgtcccggcggcttgccgccgtagtggccgaagtagaggacctggttcatccactcggccatcgcctcgagcatggtcacctgcacgcgcaggcccttgccggtgcggccacgctgcagcagcgccgaaaggatgccgctgtaggcgtacatgccggccgagatgtcggcgatcgaaacgccggcgcgcgacggctcgttcggtccgccggtgaggcccaccaggccggcggcggcctggatcagcaggtcgtaggccttcttgtcgcgatagggaccggagtcgccatagcccgagatgtcacagacgatgagcttgtcgtacttgccgtgcaggctgtcgaagtccaggcccatgcgcactgccgcgccgggggcgaggttctgcaccagcacatcggcatcggccagcagccggtgcaggatggcctgcgcctctcgatccttcagatccagggtcaggctttccttgccccggttaagccacacaaagtacgaggcctggccgtgcacggactggtcatagccgcgcgcgaagtcgcccactccggggcgctcgatcttgatgacgcgggcaccaaggtcggccagctggcgcgtggcgaagggcgcggccacggcgtgctcgagcgagaccacgcggatgccgtcgagcgggcggatgcctttgggggaatgggacatgcaggggccttagaacgaacgcggcagctcgagcacatgctcggccacgtaggacaggatcaggttggtcgagatcggcgccacctggtacaggcgcgtctcgcggaacttgcgttcgatgtcgtactcggcggcaaagccgaagccgccgtgcgtctgcaggcagacgttggccgcttcccacgacgcgtcggcggccagcagcttggagatattggcttccttgccgcacggcttgccggcgtcgaacaattgcgacgccttgtagcgcatcaggctggccgcctcgacattgatgtacgagcgcgcgatcgggaactgcacggcctggttctggccgatcgggcggtcgaacacgatgcggtcgcgcgcatagttgctggcgcgctcgacaaaccagtagccatcgccgatgcactccgcggcgatcaggatgcgttcggcgttgaggccgtcaaggatgtacttcaggcccttgccttcctcgccgatcaggtttccggcggggacttcgaggttgtcgaaaaacagctcgttggtctcgtggttgaccatgttgcggatcggcttgaccgtcaggcccttgccgatggcatcacgcaggtccaccacaaacaccgacaggccctcggacttgcgcttgacctggtccagcggcgtggtgcgtgccagcagcagcatcaggtccgaatgctgcacgcgcgaaatccataccttctggccattgacgatgtacttgtcgccctggcgcaccgcggtggtcttgagcttggtggtgtcggtgccggtggtgggctcggtcacggccatcgactgcatgcgcaactcgcccgaggcgatgcccggcagccagcgctgtttctgcgcttcggagccgtggcgcagcaggcagcccattacgtacatctggccgtggcaggcgccggaattgccgccgctgcggttgatttcctccatgatgaccgaggcggctgtcagcgacaggcccgagccgccataggcttcggggatcagcgctgacagccagcccgcctgggtcagagcctggacaaaggtctcaggaaaggcgttctgctcttccacccgttgccagtacgccgaatcgaagccggcacagaggtcgcgtaccgcttcgcggatttcggggtagagctggtctggatcctgatgtgcgtgcatggggtagccccgctcggattgaatggggccattattcccgagcccccggcacgctgaaattcggatttgcgaaagagcggcttaggtgggccggaagcggggggggggcggaagctgcatgcggcgccggggcgcccgcagttgcgcaagaggccggcgcagcggcctcttgcgcggggatggctggcaggccgggcctgggaatcagtgcatgaagagccagatcaggaccaggatgaaggccgggacgccaagtagccaggcaaggatatagggcatggtgcaactcctgtcgatgacggtaatcggtgattccaatataggaatgccgtcatggcggcactgtcggcgagcttccgcttgcggtgtaggacgcagccgcaagcgcctggcggacggcccgcgcggtgtggcgcgagcgccttggggcccgccggcccggttgccggcaggccatcccgtgctacgctcaggtgtacccaagcacccggagacgagccatggacggggtctggtccgagatctacagtgtcttgcgcgccgagttcgccgatgtgccggacgctggcgaggccacccgcatcctggcacgcctgttcatggcggtgttgctgggcggcctgatcggctatcagcgcgaggcctccggcaaggcagcggggctgcgcacccatatgctggtggcgctgggctcggcgctgttcgtgctggtgccgctgcaggcagggacgccgctggccgacatcagccgcgtgctgcaggggctgattgccggcatcggcttccttggcgccggcgcgatcctgaagcacagcgacgaagctcacatccagggcctgaccaccgcggccagcatctggatggtcgcggccatcggcgtggctgccggcctgggtcgcgataccaccgcggtgatcgccaccattttcacgctggtcatcctgcaggtcctgcagcgctggaaatagcgcacccgcgcccggtgcatccggcaccccgtgccgcccggcgtgcgccggtctgttcgcttgcccgccaatttgcgtcatttcccacagtaatgcgcgccagcgcacgctgcccgcgcgcgctgcgccctatgctgtggcacaggttgcgccgcgatccacaggcgcggccgtggcagagcagggggaggcagccatgaaatcatcgatccgtgacgatgcggcgctggccgcattcgtggggccgcgctatgcgtactacagccagcgctggtccctggcagaggcacgcggcggcatgtcgtggaactgggcggcgtgcctgctggggccgttctggatggcctaccggcgcatgtactggcaggtgggggtctatgcgctgatcgtctgcgccgaaccggtgctgcacgcgctgttcgggctgaagatgccgctggcggtccggccgatgctgtatgccatggcgctgctgctgggcatgtatggcaaccagatctaccgctggcatgccgaggcgaccatccggcacctgcgcgagtaccatttctcaccggaactggtgcacgactcgctggcgcgctgtggccgcaccagctggcccggtgtgttcgccatgggcctgctgctggtggtgatggcggtgtcgctgagcccgctggcggggctggtggtgcagggcggcgggctggccgccggctgaacggtcggcggcttccctgatttacacgggctcgcgcgccgcgtcgaccaggtactggatcagggtttcggcaaactggggcagttcgcgccccgggcggcgcaccaggcgcagttcgcgcttggcccattcgtcttccagctggataaagcgcagcaccttgcggctggcgtagcggcgcgcgcagctgttgggcacgatggcgatgcccgcgccggcctcgaccatgcggcatacggcatcgaagctgcccacctggatgcgcaggctgatgcgcttgcccatgccgccggcgatgcggtccaggaacgactggatcgcgctgaactggttcaggccgacaaagcggcaggtatcgagcaggtcggcgaaatgcagccgcttgaaggccggcagcgggtggttgaccggtgcaatcacgatcagctcatcgctgcacaggtgcatcgcgtccaggtcctgggtggcgacttcaccggccacgatgcccaggtcggcggcgccggcgctgatggccgagacgatttcctgcgacaggtgctcttccagctcgatgtccacgtccgggttctcgctcaggaagcgcgatacgccggtggccaggaacgagttggtggcggtggtgttggccagcagccgcacccggcccttgacgcccttggcatagggccgcaggtcggcgtgcaggcattccagttcgcggaagacctcgcgcgcgtggcgcagcagcgcatcgcccgccggcgtcaggcgcacccccttgacctggcggatcagcaattgtgtctggaacgcctcttccagttgcttgatccgggtgctggccgcgggcagcgacaggaagctgcgttcggccgcgcgggtcaggttctccgtctcgccaacgttcaggaagaggcggaggtcggtcaggtcgtaatgcatgggcttccgtcaggccaaaggccagttttgtgattcgtgaattccaaagtctcggccgtcaatttatcgtatccactgcggcgtggacatccggattgaccgcaccggcgggcgaatgcccgcggcgcaggggtgtttcgccgggtttgcggtcggtgaccgcacaaaaagtattcagaggagcaacgcaatgagcggtttgatggcaggcaaggtcgcgctggtgacgggcgcaggtggtggaatcgggcgcggcatcgcgctggcactggccgccgccggcgccaaggtggtggtcaacgacctcggcgtgtcgatgaccggcgagggcggcgacgccggccccgctcagcgcgtggtggaggaaatccgcgccgccggcggcgaggccgtggccaataccgacagcgtgtcgacctggaacggcgccaatgccatcgtgcaatgcgcgctggacaacttcggccgcatcgacgccgtggtcaacaacgccggcaacctgcgcgaccgcatgttcttcaagatgaatgaagaagaatggcgctcggtgatcgacgtgcacctgcacggcaccttcttcgtcagccgcgccgcggccagctacttcaaggaccaggagagcggcgcctacgtgcacatgacctcgacctcgggcctgatcggcaacctgggccaggccaactactcggcggccaagctgggcattgccgcgctgtccaagtcgatcgcgctggacatgcagcgcttcaatgtgcgctcgaactgcatcgcgccgttcgcctggagccgcatgaccagctcgatcccggccgaaacgccggaagagaaagcgcgcgtggccaagctgcagaagatggaagccggcaagatcgcgccggtggcggtctaccttgccagcccggccgccagcgaagtcaacggccagatcttcgcggtgcgtgccaacgagatcatcctgatgagccagccgcgcccggtgcgctcggtgcacatgagcgatggctggacgcctgaaaccgtgggcgagatcgccatgccggcgatgcgcaacagcttcttcaagctggagcgttcgcccgatgtgatcagctgggacccgatctgatggcgggcagccaggccgcggcgcacggcgcgcttgccggcgtgcgggtgctggacctgtcgcgcatcctggccggtccctggtgcgcgcagaacctggcggacctgggcgccgaagtcatcaaggtggagcggcccggcgcgggcgacgacacccgttcgtgggggccgccctggctgcccggcgcggacgggcagccgtcgcgcgacgccacctactttgccggcgccaaccgcggcaagcagtcggtgacgctcgatatcgccagcccgcaagggcaggagattgtgcgcgaactggcggccaagtcgcagatcgtgctggagaactacaaggtcggcgacctgaagcgctacgggctggactatgacagcctcaaggcgatcaacccgtccatcgtctactgctcgatcacgggctacggccagaccgggccgagcgcgcacaagcccggctatgacttcatcttccagggcctgggcggcctgatgagcgtcaccggcgagcgcgacgacctgcccggcggcgggccgcagaaggtgggcgtggcggtggtcgacatgcttaccggcatgtatgccaccgtggccgtgctggccgcgttgcgccatgccgagcgcaccggcgagggccagcatatcgacatggcgctgctcgatgcggtggtggcggtcggcgccacgccgatcatcgcccagcgcgtgaccggcaaggccatgccgcgctacggcaatgcgcacgccaatatggtgccctaccatgtgttcgccaccgccgacggctacatgatcgtggcggccggtaacgacgggcagtggcaggcgtattgccgcggcgtcgagcgtcccgacctggccgccgacgagcgctttgccaccggccccggccgcatcatccatcgcgacacgctggtgccgctgctcgaggcgcatatgcgcacgcggccgacggcgcactgggtgcaggcgctggaagcgcagggcatcccgtgcgggccgatcaacgactacggccaggtgctggaagacccgcaggtgcggcatcgcgagctgcaggtcgacctggtgcgcgacgacggcagcctgtgcccgaccgtcaagagcccgttgcggctgtcggcaaccccggtgcaatacgacgcaccgccgccgcggctgggcgagcataccgaacaggtgctggaatcggtgctgggtatgtcggccgagcgcatcgccaggctgcgcgagcaaggcgtggttctgattggtgacggatgcctggcaggcaactgccgggcactgcctgcttccgggcggatcaccaggcctctgcacaaagtccccccatcgcctaggctgtctgggtagcggcccgaaccgtgattcccgggttccccacaggagacagccatgaacgaagagaccttcaacctcagcatccgcaagttcctgaaggtggtcggcgtcagctcacagcgcgagatcgaacaggcgatagccagggccatggccgacggtaccatcgccggcaacgaacatttgccggtgtcggtgacgctggaactggcgggtgtcaagctccaggcgcgcttcgagggtgaaatccagcttgagtaaggcggtcatggcggtgctcgttttggttctgtttcttgcgtgaaacgccaaaaggatgaccccgcccggtccttttgttgcgccatctgatccatccgcagtatgggcgcgcaggaccccttcacatattcttcccggaaacgttgaaccaatgggaccggggggaaaccatggctggatgcaacgagcgcatgcattgcgcagggggcgcggtatgcgcaggccgtgcaacgctatgtgcgcaagggcgggtcactcgccacgcgccgctctgaggggcgggggccgttgccatgcatgccgccgccgcgcccgcaaggaacatcgaggacaccggctggaacctgccggatccggcaggtcggcacgcgcgccccgatgatccgctgctggcgtgcctgctctggctggcccggcgcttccagcggccagtcgcggccgaagccctgattgcgggcctgccgctggaggcggagcgcctgacccctgtcttgtttccacgcgcggccgcacgcgcgggcatgtcggcccggctggtcaagcgcccgctgggcgacatcccggacctggtgctgcccgccatcctgctgctcgaccagggcgaggcctgcgtattgctgcgccgtggcgacgtgggcatgctgctggtctcgcagccggagtggggcgacggcgagcagccggtccgccaggaagacctgctggcccggtacaccggccatgccatctttgcccggcccgcgcaccgcttcgaggcggcggacgatgccgggccgacgtcgccacatggatggttctggggcgtgatgcgccagtcgtggccgctctatggcgaggtgctggttgcctcgctgctgctcagcctgttcgcgctggtcatgccgctgttcaccatgaacgtctatgaccgtgtggtgccgaaccatgcgctggaaacgctgtgggcactggccatcggtgtgggcctggtgcttggcttcgagctggtgatgcgcacgctgcggggctattttgtcgacgtagcgggccggcgcatcgatgtcacggtctccgcgacggtgttcgagaaggtgctgggcatcgagatgaaggcgcggccggcgtcggtgggcagcctgagcagccagctgcatgaattcgagtcggtgcgcgagttcctgacctcggccaccatcacgaccctggtcgaccttccgttcgccgcggtcttcattgcggccatgttctgggtcggtggcccgctggcctgggtgccgctgctggcggtgccgctggtgatcggcaccagcctgctgctgcagggaccgctgtcgcgcgcggtgcgcgccagcagcgcctgcgcggcccagcgccaggccgcactggtcgaaaccctggtggggctggagaccgtcaagaccagcggtgccgaaggtgccgcccagcgcaaatgggagcaggtggtcgggcagatggcgcaactggggctgcgcgcgcggctgctctccgcctgcgtgatcaacttctcgctgttcgcccagcaggccgccacgctggtggtggtggtgatcggcgtctacctgatcgccgacgaccggctgaccacgggcggcctgattgcctgcaccatccttgccggccgcgcgctggcgccgctgtcgcaagtggcggggctgaccacccgctatcaccaggcgcgcaccgcgctggccggtatcgaccgcatgatggcgctgcccgtcgagcgcccgcccggcaagcacttcctgcaccgtccgccgctgcgcggcgagatcgagttccggcaggtcagctttcgctatccgggccgcgacatcgcggcactggatggggtctcgttccgcattgccagcggcgagcgggttggcctgataggccgcatcggctcaggcaagaccaccatcgagaagctgatccttggcctgtacgcaccggatgccggcaccgtgctggtcgacggcgcggaggtgcgccagctggacccggccgcgttgcggcgcgacatcggctatgtgccgcaggacgtgatgctgttcagcgggacgctgcgcgacaacatcgtgatgggcgccccgtacaccgacgacgaagcggtgctgcgcgcggcgcgcctgggcggcgtgagcgactttgtcgatcgcctgccggacggctatcacttgcgcctgggagagcgcggcgaaggcctgtcgggcggccagcgccaggccattgccattgcccgtgccgagttgctgcagccgccgctgctgctgctcgacgaacccagcagcgccatggacaaccgcaccgaggagcagttcaaggcgcgcctggccttagcgctgggcgggcgcacgctgatcctggtcacgcatcgcggctcgctgctcagcctggtcgatcgcctgatcgtgatggaccagggccgtatcgtcgccgatggtcccaaggccgaagtcctgaacgcgctcgcggggaggaagctccatgtcgcttcagcctgatccgcaacgcatggggccagtgcggcgcctgatcgccgcgctgaggccacgtgccgacgacaccgccttcatgtgcgagcgcgatgcggccacgatggcgcaaccgcgctatttcacgcactggatcctctggtccgccctggtcttcgtgctggtggcgctggcctgggccgcgctggcgcgggtggacgaggtggccgtgggcgagggcaaggtgatcccgtcgagccaggtgcaggtggtgcagaacctcgaaggcgggatcatcgccgagatcatggtgcgaccggggcaggtggtgaacaaggaccagccgctgatgcgcatcgacgatacacgcttcacggcttcataccaggaaggccgcaccagggacgatgcgctggtggcacgcattgcgcgcctgagcgccgaggccgacggcacggcgttcgtggcgagcgcgccggccgatgccgagggccgccgcttcgtgtccgaggagcgcgcgctgttcgagtcacgcaagcgcgcgttcgatgccaatctcgccgtgctgcgccagcagtccgagcagcggcggcaggagctgaccgagaagcgctcgcgcgagcagcaactgcggcagagccatcggctggtggcacaggagctggccatgatgcgcccgatgatggcgcagggcgtcgtgtccgaggtcgacctgctgcggctggagcgccaggccaatgacctgaaaggcgagctcgaggccgcgcggctcgccatgccgcgcctggaggccgcctaccgcgagagccagcaaaaagccgacgaactgggcacgcattatcgtgccgaggccatgaaagagctcaaccaggccaaggccgaacaggccgcgcagagcgccaccaacaccgcgctgcaggaccgcgtcgaccgtaccctggtacgcgccccgcttgcgggcgtcatcaagcagatcaagatcaataccgttggcggcgtggtgcagcccggcatggatctgctggagatcgtcccgctggaagacacgctgctggtagaggcgcgcgtgcggcctgccgacattgccttcctgcggcccggccagccggcggtggtcaagctgtcggcctatgacttttcgatctatggcggctttgccggcaccgtggagcatatcagcgccgatacgctgacaccggagcgcccgggcgagcgcccggaaagctactacctggtgcgcgtgcgcacgcgcgacaaccggccaggcggcagtgccgtgcaggtgcccatcctgcccggcatggtggcgacggtcgatgtgctgaccgggcagaagacggtgctccattacctgctcaagcccatcatcaagaccagggaactggcgttccgggaacgataagagcgggcggtttgcccacgacgacaacaagcaaggcatggccagcaggctggcattcaggacggagagtgatcatggcaaccctgacaggtagcaacggcagcgacagcatcagcggcaccacgtccgccgacaccatcctgagcggcaatggcaatgactacgtcagcgccggcgatggcaacgactatgtcgatgccggcaacggcgacgatatcgtcgaaggcggcagcggcgacgacacgctgctgggcgccaacggcaaggaccgggtcttcggcgggctcggcaatgacaacttgtcgggtggcaacggcaccgacgcggtctatggcggcggcggcgatgacgtgatcggcagcatcgacggctcgtcggcgctttacaccggcgacaatggcggcgatacgctgtatggcgacggctatgacagctacgccgactacctgctcggtgccggccatgagtcagcccggccgggtaacgaccgcatctatggcggcaacggcgacgacctgatctacggggacaacggcaacaatgccgccctgggcggcgacgacatcattgccggtggcaacggcaaggacaccatctacggtgaaggcggcaacgacaagatcgccggcggggcaggcggcgacaccctgagcggcggcagcggcgccgacgtctttgtctataacgccgtctccgactccaccgcggccggcatggatgtgatcaccgacttccagcgcggcgtggaccacctcgacttgcggcccgtgctgggcgacactggctttgaatggggtggccgccagcccacggcccacggagcctggttccagcaatcggggggcaatacctatgtctacgtggatgtcgacggcaatcccgccacggcggaaatggtcatcaagctcaacggcctgcacgaactgaccaagtcggacttcgctggctacgacaaccatgcgccaacggcagtggccgatacccacgcgatcggcgagaacaactctccgaacccgatcaccggcaatgtgctgtcgaacgacagcgacgtcgatgcggggaacgtgctggccgtggccaatcccggcacttatgccggccagtacggcacgctgacgctccacgccgacggcagctacagctatgagctggacaacggcaatggccaggtgcaggcattgcggcagggccagcaagtccaggacacgttcaactatgaggtgtccgacgggcaggccagcgcggcttcatcgctgagcatccggattactggtgccaacgatggagccacgatcacggcctcggacagcgaagacaaggcggtaaccgaggctggcggcgcaggcaacaccgacctcggcgacgcctccgccagcggcaagctgacggtcactgacgtcgataccggtgaagcgcactttgccgcagtgccgccggagagtctggcaggacagtacggcaccttcagcttcgacagcaacaccggcgcctggagctacacgctcgacaacaccaaggccgatgtgctgatcgcggggcagcaggtcagcgattcgctgacggtgtcctccgccgaccagagcgcgcagcagaccatcaaggtcgacatcaccggtgccaacgaccacgccaccatctcggcctcggccagtgaggacaaggcggtcaccgaagccggcggcgcaggcaacaccgacctcggcgacggctccgccagcggcaagctgacggttactgacgtcgatgccggtgaagcgcacttcgccgcggtggcgccggacagcctggtcgggcagtacggcaccttcgccttcgacagcaacaccggcgcctggacctatacgctggacaacaccaaggccgatgcgctgatcgcgggccagcaggtcagtgattcgctgacggtgtcctccgccgaccagacggcgcagcagaccatcaaggtcgacatcaccggtgccaacgaccatgccaccatcacgtcctcggccagcgaggacaaggtggtgaccgaggctggcggcgcaggcaatgctgaaacgggtgacgcctccgccagcggcaagctgacggtcactgacgtcgataccggtgaagcgcactttgccgcagtgccgccggagagtctggcaggacagtacggcaccttcagcttcgacagcaacaccggcgcctggagctatacgctcgacaacaccaaggccgatgtgctgatcgcgggccagcaggtcagcgattcgctgacggtgtcctccgccgaccagagcgcgcagcagaccatcaaggtcgacatcaccggtgccaacgaccacgccaccatctcggcctcggccagtgaggacaaggcggtcaccgaagccggcggcgcaggcaacaccgacctcggcgacgcctccgccagcggcaagctgacggttactgacgtcgatgccggtgaagcgcacttcgccgcggtggcgccggacagcctggtcgggcagtacggcaccttcaccttcgacagcaacaccggcgcctggacctatacgctggacaacaccaaggccgatgcgctgatcgcgggccagcaggtcagtgattcgctgacggtggcttcggccgaccacacggcgcagcagaccatcaccgtcaacatcaccggcgcaaacgactacgctacgatcacggcttcagccagcgaggacacctcggtgaccgaagccggcggggcaggaaatgccattcccggcgacccctccgcccgcggcacgttgacagtcaacgatgtcgataccggcgatgcgcactttgccgccgtgccgccagcgagcctggtcggccaatacggcgccttcaccttcgatagcggcaccggcgcctggacctacacgctggacaacagcaaggcgcagtccctcgccgcgggccagcatgtgaccgactcgctgtccgtacagtcggccgatctcagtgccacccaggcgatcaccgtcaacatcacaggtgccaacgatgctgcggtgaatgccgttccccttgcgcaggtggtcaacgaagatacgccattggtgttccgtacggccaacggcaatgcactcagcatctctgacgtggacaacgcgagccacaccgtgacgctgagcgcaagccacggcgcgatcacgctgaatggcgttgccgggctgcagttcctgtcgggcgacggcaccgcggacagcaccatgacattcacgggcagcgatgcggcaatcaatgctgcgctgaatggaatgagcttccttggcgagaaggattatgcgggcgccgcgtcggtgcagatccagaccagcgatggcgctttggtcgataccgatacggtggcgattacggtcaatcccgtcaatgacgcgccggtggcagccgaggacgttgtctatgtttcgactaacaccgacaacatcctgattccggtgagcgcgctgctcggcaacgacgtcgatatcgacgggcgggccttgtccataaacccgctcagtctgacctcaagcacgctttccggcctgaggcttgtcaccgaaagcaattacagcttcgtcgcgttcgacagtcccaacagcaagggggtggcaaccttcagctataccgtcgaagacggggcaggtggcagcagcacggcgacggtgaccgtcaatgtcgtggacaaaaacggcttttcgcttgatcaggccagctaccaggcttcctatctggagggtggcagcaatcccgacagcatgactggtgccgttgcgggtgacatcttcattggcggacgtggtaccgacatcctcaacggcgggaacggcgacgacgtcttgagagggggcgccgacaacgacaccctcaacggcgggatcggcgacgacgtcttgagaggtggcgccgacaacgacaccatcgacgggggggtgggcatagatatgctggatttctccgatgccaccggcgcggtctccttcacgttgatccaaagtagcaccctcgtcaaggtgcttgtgggcgcgacgcccggactaggtaccgacagctacgcgaacatggagggcgtgatcggctcggcgtttgtcgacacgctgaccggcagctccgccaacgacgtcattcgcggtggcgcgggcgatgacaccatcaacggcggcgacggcatcgacctgcttgatttctccgatgccaccggcggggttgtgttcacgctgacgcagagcggcagccccaccacggcaggcccgggcgtgactggcctcggtgccgacagctacagcaacatggaaggcgtcatcggctccgccttcaacgacaacctcaccggctctgccggcaacgacgtgctgcgtggcggcgcgggcaacgacgtgttggtcggaggcgccggcaacgacgtgttgaccggcggcgccggcgccgacacactgaccggcggcaatggcagcgacacctttcgctttctgcgcgcggaccccgcttcggtcgacaccatcaccgacttcggtgcggctcccgtggcttccggtggcgatgtgctggatctttccgatctgctttccggtgttggcgtgaaccctgccaacgcggcgcagttcgtccgcctttcggaggtgggtggcaacaccgtggtcagcctggatcgtgacggcagtggcacggcggctgcattccaggacgtggcggtgctgcagggcgtggtcgggctcgatctcaacacgctgttgagcaacggcaatctccacaccgcctgaggcgggcgatcggtggcggattcagagagggaaatgcagggcggcagtaaagccggaatccggcgcagttgaaaaccataataaacgggtggcgcaccgcttcccgtatcgcgcaggcgccggccagcgcgatgcgcggcagcgggtgcgcccgagcgggggaagcatgacaacgacatggtgccggctggcacatgtactgctatgggccgccatggtggtgccgcatcacgcggcagcccaggtgctgcgccaggcagtcgagcaagccgtgcataccaatcccgaagtgctggcggcgggcagccgccggctggccgcggacgaggggctgacgcaggcgcgcgccggttacctgccgcgggtcgatgtcaatgccgccaccggtcgcgtacgcctggacagccacagcacccggctgatgggcctgtccgactcttcctatgccagccacgccgccggcgtgacgatctcgcagatgctgttcgacggctttgccaccagcagcgatgtggagcgccagggcgcacggatcgacggcgcggcctatcgggtcggcgcgactgccgaagacatcgcgctgcgcacggtcggcgtttatgtggaggtcctgcggcgtcaggaaaccgtggccatcggcctggccaatctggaagcgcaccagcacatctatgaccagatccggcttggcgccgacaacggggtgctgcgccgcgccgatctctatcaggtcgaaagccgcctggcgctggccaaggccagcctgcgggcggagcagggcagcttgcaggacgccatgacagcctatttacgcgtggtcggcgcgccgccggaggtcttgtccaggccggactcgctgtcgacgctgctgcctgccaccgaacgggaggcgcagcaggtggcaaacgccaatcaccccgcgctgggtgccgggcaggccgatatcgccgaagcccaggccgggcgttcgctggccaaggccgcgttgtggccaaggctggatctcgaggtcggcgtggcgcgcgaccgcgaccgcgtgctcggcaccaccgacgagcgcagcgtgatgctgcgcgtgcgctacaacctgtttcgcggcaacgccgacaaggcgcgcatcaacgaggccggctaccaggtccaggaagcagagcagaatctggaccgtctgcgcagacaggtgcaggaggccgtatcgcaggcctataacgcccacctgacggcgaaggaccgtctggtgagcctcaagcaatacgtggaggccagcgatgccacgcgcgtcagctacggcaagcaattccggattgggcagcgcagcctgcttgacctgctgaatgccgagaacgagtacttcagcgccagcacggcctacgtgaccggcaagtacaacgaactggccagccagtaccgcatccttgccggcatgggcttgctattggcgaccctgcaggtgccgccgccccagacggggatggtgcaggtagggcagcgggcagcgccgccggtgggacagaggtagcggggggacggtgccgggcaagccggcagccatgcttcagccgccggccaccggagatcctgacccggcccgcatcagcgcggcaaagcctctccccgcaatccccgcatccgatactctcccggcgccacgcccgtccatttcttgaaggcccggtggaacgtgctcggttctgagaagccaagccgcagcgccacgtcctgcagcgtcatgccggggcgctccatcatgccgatggccacgtcacggcgcaggctgtccttgatgctctggtagccgctgccctcgtcgcgcagccggcggcgcagggtctggggcgtgagccgcagcatctgcgccatctgctccagcgacggcagttcgtcatccaggtgggagcgcaagtgctgccggatgcgctcggcaaggcagctgttgtcgcggtagcggatcagcaggttgcgcggcgtctcgcgcaggaactcgcgcaggctggcggcgtcctgcatcaccggcaggcgcaggctggcgccatcgaaatgcagcacggagacaggctggccgtaatgcacggcggccttgaagacgcgctcggtctcggggccgccctgcgacggcgccgcgctcaggtcgacccgcgccagcgggatatggccggccaccagccagctgagcagcgcgtaggcatggaacacgaaagtcgattcggcaaagctgcggcaggccgaggccggcgcacgcggatgcagcaccacggaggcggccttgccgtcggcgctgacatgcaggcgtggcgcgaaggcgtcgatatggagccggtacagccgcaagccggctcggatggcgtcttccagcgtggcgcaatggatcaggttgcggcacgcctgcgcaaacacgcccggggtcacgggccggtccagcagcccccatagttcatcgcgcatgacgcggcgcagcgtgcggatcagcgccgcgtactggccctgggtgacgcgcgcattgggcgaggccagcagcgccggcgaaatcccggcccggcgcagcagcgcggcaatgtcgtggcccagtcggcgcgggcccagcaggatgtgatccacatgctggatcgcaatggtgtggcgcgccgaggcctgcggcgccgtgccggccggggcctcggtgcggcccgggacacggccgtgcccgggcgccggcggcagtgcgctgccggcgaggtgcagcttgcctggcacgggcgggcgcggcgatgacaggacagcggtatgcatgggtctcctcatcacggtggcgcgtcggcgccggcaccgcggaacggctggctccgcgggcgttccaggacgtttcgccacatcgtcccggcaccttagcaagccgcggccgcgccgcacaatcgggatttgccaaaggctgccttccatctgagcgattcggccaatcattttggcttgtctggtcattgtccacgcaccgcagcatcgcgcactctccggctgataccgatacaaggccggcgcaccggcccggacgggaccagaaacggagcaaccacccgttccccgcctcaggaaaaacaatggagacaacaacacatgcaggcagatcgtcgtagtgcgctgtggcgctttggggccggattgctggcgtggagcggcgttgccgccgggatgctgggggcgggcgccgcgctcgcgcagagcgaattcccggcgcgcaccgtgcgcatggtcgtgcccttcccggcaggtggcgccaccgatgtgctggcccgcgccattgccgaagggctgggcaaggcctggaagcgcccggtggtggtggaaaaccgcccgggtgcgagcggcatgctcggcgccgaggtggtcgcccgtgccgaggccgacggctacaccgcgctgctgacgatcacgccgctggtgcaggcgccaagcctgtatgcccgggcgccctatgacccggtgaaggatttcgccgcggtgtccgagctcggcacgaccaacctggtgttcgccgtcaacagcaatgcggtgcctgccaccaacctgaaagacttcatcgcgcaggttcgcgccaagccgaagcagttctcctacggctcgttcggggccggctcgagcggccacctgtacggcgaggtcttcaacgaggccgccaagatcgacatgctccatgtctcatacaagggcgaggctccggagctgaacgacctgctgggcggccaggtgccggcggcggtgatctcggtgatgggcgccaagccccacgtcgccaccggccgcctgcgcgccctcgcggtgactggccccgcgcgcgcgccgcaactgccggatgtgccgactttccgcgaagccggcattgaaggcatggatgcgatgggctggttcgggctgctgctgccggccgccacgccgcggccgatcgttgagaagttctcggcggacgtcaaccgcgtgctggcccagcccgacgtgcgcaagcgcatgaacgagcttggcgtgatcctgaccggcagcacgccggacgcgtttgcccagaccatccaggccgactatgtccgctggggcaaggtgatccgcaccaggaacatccgcctggattaagccattcccgtttgacctgcatcgattgctgcatatgaagcctgctacaagtacccgcgagccgttccgctcccccgcctggccgcccggcctgccggccacgctgcatacgcctcgcaccagcctgttttataacgtcgaggcggcggcgcaccgctatccggacaagaccgcgatccagtatttcggcaccgcgatttcctacggccagctgcaggacgagatcgaacggatggccggctacctgcagcaggcctgcggcatcgagccgggcgaccgggtgctgctgttcagccagaactgcccgcagttcatcattgcctactacgcgatcctgcgcgccgaaggcgtggtggtcccggccaacccgatgtggctggaggccgaacttgcccatgtggtgcaggacagcggcgcggtcgccgcctttgccggcagcgagctgtaccagcgcgtggcgccgctgcacggcccggcgctgcgccatgtgatcctgcacgactatgccggcatgctgcgcgacgacggcggcctggccgtgccggcctggctgcgcgaagcgccgcccgcgccgcaggctgcgccgtccggcgccatgccggtggcctgggacgcggccagcgccgccgggtaccggccgctgccgcaccaggccggctacgacacgctgtgcatgctggcctatacctccggcaccaccggccatcccaagggctgcatgcatagccacggcacgctgatgaccgcggcggccggtgcggtgatctggcgcggcgccacacccgaatccgtggtgctggccgtggcgccgatgttccacctgctgggcatgcagaactgcatgaactcgccgctctacctgggcgccaccgtggtgctgatgccgcgctgggaccgcgcgctggccgcggacctgctcgagcgccaccgcgtctcggtctggggggcgccgccggcgatgatggtggacttcttctcgcagccgggaatcgacgcgcgcgacctgtcgagcctggcctacgtcggcggcggcggcgcggccatgcccgaagcggtggccaatatgctgcaggaacgcttcggcctgccctacgtcgaggcctacggcatgaccgagaccgcggccttcatcctgtccaacccgcgcaaccagcccaagcgcgaatgcctgggcatcgccaccttcggcgtggacgcacgcgtggtcgatcccgagacgctgcaggaactgccttgcggcgagaccggcgagatcgtggtccacggcggccaggtgatgctgggctactggaacaacccggaagccaacgcggccaccttcatcgagcttggcggcaagcgcttcctgcgcaccggcgacctcggcttcatggacgagcaaggctacttcttcatgcgcgaccgcctcaagcgcatgatcaacgcgtccggctacaaggtctggccggccgaggtggagaacctgctgtacgggcacccggccatccacgaagcctgcgtgatcgccgcccgcgaccagcgccgcggcgagaccgtcaaggccgtggtggcgctgcgcccggaagcacgcggcacggccgacgccgaccccgaacgcatcatggcctggtgccgcgagcatatggccgcgtacaaggtgccgcgcatcgtcgacgtggtcgatgcgttgcccaagtcggccaccggcaagatcctgtggcgcgccctgcaggagcgcgagatgcaggcggaccacccgagcgcctgacaccagcggcgaattcagcaaagagagagacagcatgcagcaaagcagacgcaactggctggcacaggccggcaccctggccggcgcggccatcctcggcggcgcgggcagcgccttcgcgcagcaatcgtatccgagcaagccgatccgcatgatcgtgccgtacccggccggcggcggcaccgacaccgtgggccgcctgatcggccagcgcctggccgaaagcctgggccagccggtggtggtcgaaaacaagcccggcgccagcggcatgctgggcaacgacaccgtcgccaaggcgccggccgacggctacaccatcctgctggcgatcacggccctgatccaggcgccggccctgtacaagcgcacgccatacgacgtggccagggacttcacgccggtctcgcagatcgccaagtcgtccgacctgttcgtggtgcccaaccgcgtgcccgccagcaatatgcgcgagttcctggcgctggccaaggcgggcaagctcagctatggctcctacggcaacggcacctcgtcgcacctgcacggcgagctgctcaagcagcaggcaggcatcgagctcgcgcatatcccttacaagggggcggcgccgctgatgagcgacctgctcggcggccaggtggacagcgcctttgtcgacgtgacctcggccaacgcctacctgggcagcaacaagttcaagatcctcggcatcaccggcacccagcgctacaaggcgctgcccaatgtggcgaccttcactgaactgggcctgccggggttcgagcccaacggctggtacgggctgttcctgccggccaatgcgcccaaggatgtgacggcgaagctggcggcagagaccgcgcgcatcgtgcgcctgcccgaagtgacgcagaagctggccggcatgggcctgcagccggtcgggtccacgccgcaggaactggcggccgtggtcgccggcgacacacccaagtgggccaggatcgtgcgcgacgccaatatccagctcgactgaaacccgcctcccggagcctaccgatggaaaccatccgcttcgccgtcgaggacggcatcgccacgctgacgctggactcgccggcgcgcaagaacgcgctgtccttgccgatgcgcgacgagatcggcgaagtgattcgccgggtacgcgccgacgacagcgtgcgcgcgctgatcctgaccgccgccggcaccgatttctcgtcgggcggcgacatcagctcgatgcaggtcgagatcaatgccgagcagggccgcaagcgcctgcacaaggtgcacggctggctggaagacctgatccagctcgacgtgccggtcatcgccgcggtggacggcgcggcctatggcgcgggcttcagcctggcgctgacggccgacatcatcctggccacgccgcgcgcgcgcttcgggctcccgttcctgcgcatggggctggtccccgactgtggcgtgttctacacgctgccgcggatgatcggcctgcagcgggccaaggcgctgatgttctcgatgcgcgagctgaacgcccaggccgcgcaagaccttggcatcgtcatggaaatcgtgccggcggacagcctgcaggaacgtgcgcggacgctggcgcaggccttcaccgaggcctcgccggtggcggtgggcctgaccaagcaggcgctgaacgcctcgctgaaccaggacctgcacaccatgctggcgatggaagcggacgggcagggcattgccttctccactgcctatcgccgcgaggctgccgaccgcttcatggccaagcagccgctgcgctaccgctggccggactgagcggcggcgccggtcatgctgctccgcagcatccggctgcctcgccagtctgtcgtttacgtatacaggcgggtgctggccggacagtaccggtcgcctgttcattttctcgtttaccctgataccagcacaccatatgggatcccacgaccagcacacggcgcccgccgtacgccagaccccctggatgaccgaagacctggggatgttccaggaaaccgtgcgccgcttcatcgagcgcgaactggcgcccaacgaggcccgctgggccgaccagggctatatcgaccgcgaggtctggcgccgcgccggccagatcgggctgctgtgcgccagcatccccgaggaatacggcggcggtggcggcacctttgcccacgaggccgtcatcacccaggaaatgtcgcgcgccgtctgcaccagccttggcaataatgtgcacagcggcatcgtggcacattacctgctcaactacggcacggaagcgcagaagaagaaatggctgccgcaaatggccagcggcgaaatggtggcggccattgccatgtcggaacctggcgccggttccgacctcaaagcgatacgcacccgcgcggtgcgcgaacagaccgaaaacggagactgctatcgcataaacggtgcaaagaccttcatcacgaacgggtatcacgccgacctggtctgcgtggtggccaagaccgatccggaagccggttcgcgcggcgtgtcgctggtcatggtggagacgcgcgacctgccgggtttccgtcgtggccgcattctcgagaagatcgggcagaaagggcaagacaccgccgagctcttcttcgacgacgtgctggtgccgtgcgacaacctgctgggcacgcaggaaggtcagggtttctaccagcttatgcagcagctgccgcaagagcgcatgatcattgcgctcggggccgtggcgaccatgcagcgcgccatcgagctgaccaccgaatacgtgcgcgagcgcaaggtgtttggccagccgctggccgatctgcagaacacgcgcttcaagctggcggagtgcaagacggtcgccaccattgccgcgaccttcgtcgacgattgcatgctgcgcctgatggacggcaagctcgacgctgccacggccgccatggccaagtggtggtgcacgcagcagaactgccaggtcatcgacgagtgcctgcagttgcacggcggctacggctacatgcttgaatacccgatcgcgcgtatgtatgcgaatgcacgcgtgagcaagatcttcggcggctccaacgagatcatgaaggagctggtcgcgcgcacgctttgacgcgcctgctatcagcagtgtgcgcgtgctagtgcgcgcaaacgcgtaagaaaatgcggaaaaacgaaagccgacaccagtgccggccttcgtgcgtatggttacaaaaccggatgtgcacggatggcgggaaaggtgtaaggtgtttcacaagcatggtcaatggcccgtcgcgtgcgggggcaaggtccgagcggaatgcagccaaaagctgaagcgaattcatgcagaaaatgcagcaacgaaacagtcgttgcatcgatgcaagatttgtcaactcggattccaccatcgccgttatttgactatgatgaagtaaagacttcgcaacatgacaggtcgccaggccggggtggtgtgccgcgaacgttgcgcgaagccttaggggtagcacgcctcggacgtgaactctgacgggagtgaggtatggacatttttggccattacgctacgcgcttcgaagctcgcaaggaagaggaatacagcatccaggagtacctggagatctgcaagaaggatccgactgcctacgcgactgctgcagagcgcatgcttgccgccatcggccagcctgagctggtggatacccaccatgaccccaggctgtcccgcctgttcttcaacaaggtcatccgcatctatccggccttccgcgacttctatggcatggaggacacgatcgaacagatcgtctcgttcttcaagcacgcggcgcagggcctggaagagcgcaagcagatcctctacctgctcgggcctccgggtggtggcaagtcctcgctcgctgaaaagctcaaggcgctgatggaggagatccccatctacgcgctcaagggttcgccgatccatgagtcgccgctggggctgttcgcgccagaggaggacggcaagatcctggaagaggactacggcattccggtccggtatctgaacaccattgcctcgccatgggcggtcaagcgcctgcacgagttcaacggcgatatcaccaggttccgggtggtcaagctgcgcccttcggtgctgtcgcagattgcgatctcgaagaccgagcctggcgacgaaaacaaccaggatatttcctcgctggtcggcaaggtcgacatccgcaagctggaagattttccgcaggacgatccggacgcgtactcctattccggcgggctctgcctggccaaccgcggcctgctcgagttcgttgaaatgttcaaggcgccgatcaaggtcctgcacccgctgctgacggcaacacaggaaggcaactacaagggcaccgaaggcttcggcgcgatcccgttcgacggcatcatcctggcgcactcgaacgaggccgagtggacgaccttcaagtcggacaagaacaacgaggctttcctggaccggatctatatcgtcaaggtgccgtacgtgcttcgcgtgtccgacgaggtgaagatctacgacaagctcttgcgcagcagttcgctgtcggccgcgccgtgcgcgcccaacacgctgaagatgatggcgcagttcgcggtgcttacgcgcatcaaggagcccgagaactccaatgtcttctcgaagatgcgcgtctatgacggcgaaagcctgaaggacgtggatccgaaagcgaagtcgtaccaggaataccgcgactacgccggcatcgacgaaggcatgaacgggctgtcgacgcgctttgcgttcaaggttctgtccaaggtcttcaacttcgacaacaccgaagtggcggccaacccggtgcacctgctgtacgtgctcgaacagcagatcgagcgcgagcagttcccgccggagcaggaagccaagctgctgtcgtacatcaaggagtacctgaccactccgttcgtggagttcatcggcaaggagatccagaccgcctacctggagtcgtattcggagtatgggcagaacatcttcgaccgctatgtggtgttcgccgacctgtggatccaggaccaggagtaccgcgatcccaataccggcgagatcctcgaccgcaacgcgctgaacgacgagcttgagaaagtggaaaagcccgcgggtatctcgaacccgaaggacttccgcaacgagatcgtcaacttcgtgctgcgggcgcgggccaacaacagtggcaagaatccggtctggaccagctatgaaaagctgcggatggtgatcgagaagcgcatgttctccaccacggaggacctgctgccggtgatctcgttcaatgccaagtcttcgcgcgaagaccaggataagcacgagaacttcgtcaaccgcatggtcgagaaggggtacacgcccaagcaagtgagacttctggtggagtggtatctgcgcgtaagaaagtcatcgtaacggcgccgcggaacaggtctctcaacgagggcaacatatggctacggtcatcgatcggcgcgagaacggcggcaacaagagtgccgtcaaccagcaacgtttcatcaagcgctaccgcgagcagatccggcaagcggtggcaaaggcggtgtccggccggaagatcatggacatcgagcagagcggccaggtgtccattccggtcaaggacatctccgaaccgatcttccaccacggcccgggcgggcggcgcgagtggattcaccctggcaacaagaaattcgtcaagggtgattccttcgaccgccagcagcagggcggtggcgggaccggttcgcgcgccagcgacagcggcgaaggcgaagacgatttcgtcttcacgctgtcgcgcgaggatttcctgaacttcttcttcgaggacatggcgctgccggacctggccaagcgccacctcgccaagatcgccgaggtgcgcaaggtgcgcgccggcttttccatcgacggcacgccgtccaacctgtcgatcctgcgcaccatgcgcagttcgctggggcggcgcatcgccttgtccagcccttaccagaagcgcctgcgcgagctggagctggactacagcgaggcgctggaaaaggacggcccctacgccgaaggcacgctcgagctgatggagaagatgcggcacctgcgtgcctgcatcgaccgcgtgccgtttatcgagaagctcgacctgcgctacaacaaccgcgtgctgaagaagcgcccccaggcccaggcggtgatgttctgcctgatggacgtgtccggctcgatggacgagagccgcaaggacctggccaagcgcttcttcatgctgctgtacctgttcctgaagcgcaactacgagcgcatcgacgtggtgttcattcgccatcacacggtggcgaaggaagtcgatgaggaagacttcttccactcgcgcgagtccggtggtaccgtggtatccagtgcgctgaagctgatggtggaagtgatccacgaccgctatccgcccagccagtggaatatctactgcgcgcaggcgtcagacggcgataactgggccggtgattccgagttgtgcggacgcctgctgcgcgattcgatcctgccgctggtccagtactatgcatatgttgaagtcgcatcggaagagccgcagaacctctgggaagagtatctgacggtcaagggacagttcgatcactttgcgatgcagcgcatcatcggtgcggacgagatctacccggtgctgcacgacctgttccagaagcgcgcagcataggttggcgccgatcctggccttcctcgcggggggccacagtgaaggcaaatggcgaggcaacgcggaccacgcggcgcggcgatgccgtgcgcgccggacgggtctggcgccttgcccgggcaacaaggggcgaagatggcttatctctccacgggttcggaatggaccttcgagctgatcaaacggtatgaccgcgagatcgcccgcatcgccggcgaattcgggctggatacctatcccaaccagatcgagatcatcaccgccgagcagatgctcgacgcctacgcgtcggcggggctgccggtcggctacagccactggtcctacggcaagcacttcctggcgtccgagcgcagctaccagcgcggccacatggggctggcctacgagatcgtcatcaactccaatccctgcatcgcctacctgatggaggagaacaccatgccgatgcaggcgctgacgatcgcgcacgcctgctacggccacaactccttcttcaagggcaactacctgttccgcacctggaccaacgcggacgccatcgtggattacctgctgtttgccaagaactacgtggccgagtgcgagcagcgttacggcgagcgtgaggttgaactgctgctggactcttgccacgccttgcagaactatggcgtggaccgctacaagcggcccaagaagctgtccatcaccgaggaaaaggcgcgccaggccgatcgcgagaactacctgcagatgcaggtcaacgacctgtggcgcaccctgcccaagcaccggccgcatgcgctggcgtcggaggacgaggcgtccgagggggaaatcatctttccgcccgagccgcaggagaatctgctgtacttcatcgagaagaacgcgcccaagctggcctcgtggcagcgcgagatcgtgcgcatcgtgcgcaagatcgcgcagtatttctatccgcagcgccagaccaaggtcatgaacgaaggctgggccacgttctggcactacaccatcatcaaccagctgtacgaggaaaagctggtcaacgatgcgttcatgatggagctgctgcaggcgcataccaacgtgatttaccaaccgccgtacaacagcccctattacagcggcatgaatccctacacggtcggtttcctgatgttccaggacctgcgccgcatgtgcgagaacccgaccgaagaggactaccgctgggccccggagtttgccggcagcgactggcgcaagacgctggactttgccatgcgcaacttcaaggacgagagcttcctgctgcagttcctgtcgccgcgcgtgatccgcgagctgaagctgttctcggtgctggacgatgaccgcgaaggcaagctgcgcgtcaccgcgatccacaacgatgaaggctaccgcgcgatccgccagctgatggcggcgcaatatgacctctccagcatggagcccaatatccaggtcaccaatgtcgacgtgggcggcgaccgctcgctgacgctgcggcacctgcagaacgaccgccggccgctggcgcacaacttcgacgaggtgatccggcacgtgacccggctgtggggcttcaccgtgcggctcgaggtcgcctacgaggacggccgcaccgagctgaaatatgagtgcaagccggagcggcgccaccgccgcccgcacggcggcggcctcagcctggccgcctgatcccgcgattgccggggttaggcccggccgctcaggcggcgggcgcgggctcgcaccattcgcgcaccagctccaccgcgttgcggccggcgctggcgcatacctgctcgcccagcatccggctccaccagcgctctgacccgtccgccacgcgccacgcatgcagccggcgcgtatagagttgcaggtcgtattcctcagtgatcccgatggcgccgtgcacggcgtgagcgatggcggccaccggcgtgaccgcgtcgctggcgcgcagcttgccgatggccgcgcgcagccggtcgggcgtgccggtgccgctgtcgcaggccagctgtgcggccacgcgtgcggcggcgacatgctcggccatctcgctgacctggtgctggatcgcctggaacttgccgatggcgcgcccgaactgctggcggtcgttggcgtactgcagggtcaggtcgagcacgtgcgacagcgcgccggccagctgcgccgtgtgcaggcaggcgcccagcgtgcgcagggtgccggcgggcagtgaaaacgccgctggcgccgaggcgtcagggcgcggcacgcgcagcgtcaggtcgtgatgggcgccggtcgcttcggcgcgggcatcggccgccgacagcagcaggcaacgctcgccgtcctgcagcaggaaccactgcgcatggcgggcgtcggccaccagcgccgcgccggcgccgtcttcaaagccggcgagtgcgaccgggccggcgggcagggcgatgccatgcgcctgcagcagcgcgcgcgcaaagatggtctgcgccagcggcaacggcaaggcgtggcggccggtggcaaagagcaccggcgccagctcgcgcagcggcagcgcggcaccgccggctgattcgggcagcaggcaatcggcaaagccgctttccagcagcgcttgccacagcggctgcgggtcggcctgctgttccagcgcgcgcacggtggcgggtgggcagcagtcgcgcagcagcgcgtcgagggcgtcggaataggcgttatgcatggggtatctcgttcaggatggcggtcgacgggggcggattcagcgcaggccgagcccgcgcgcgatcatgccgcgcaggatttcgcgggtgccgccgcgcagcgagtacgacggcgcgatctgcgtgacataggccagggtgcggtacagcgccccatcggccgccagggcgggttcatcaccgagcgcggcttccaccagcgcggggatcgactgctcgaaggtcgtgcccaggtccttcaccagcgcggcctccaccaccgggctttcaccggcggccagccgcgacgtgacggccagcgacatggcgcgcagcaccgccaggtggccggcgagccggcccgcggtcaccgtgtcgcggcgtgccggcggcagccggcgcatggcgtcgagccaggtgtcgagcagcaccacgctggagtagaggcgctccgggccgctgcgctcgaacgccagctcggcgttgacctgctcccagccgctgccttcctggccgaccagcgcgtccggggccagcgccgcgtcgtcgaaggtgacttcggagaagtgcgcgtcgcccgccaggtcgtggatcggccgcaccgtcacgcccggtgcgtgcagatcgacgatgaactgcgacagtccggcctgccggtcctgcggcatgcccgaggtgcgcaccagcgcgatcatgaagtggcagcggtcggcattggtagtccagatcttgcggccgttcaggcgccagctgccgtccgcctggcgcaccgcgcgcgtggccacgctggccaggtccgagccggagttgggctcgctcatgccgatgcagaagaaggcctcgccgcggctgatcgcgggcaggtagcgcgccttctgcgcgtcgttaccgtagcgcaggatcagcgggccgctctggcggtcggcgatccagtgcgccgacaccggcgcgccgcaggccagcagttcttccaccagcacgaaacgcgaaaacgggtccaggcccgcaccgccgaactgcgccggcagtgtgatgccgacccagccgcgcgcggccagcgcccggctgaaggcggcgtcaaagcccatccacgagcgcgcgcgcgtttccggcggcagcgcgggcaggtgttcatcgagaaaggcccgcacctcgccgcggaacgccacggcgtgcggcggcagggaggtcaggccgaaagtggaaagcaatgcggtcacggtgaaatcctgtgtctggtattggctggtgccagcggtctcagtccagcgtcgcgcctgaatccttcacgaccttctgccagcgcgtcatttccgcgctgaggtaggcggcgtaggcctccggggtcgatccgcgcggctccgccccctgcgcggccaggcttgcgcgcgtctcggggtgggccagcgccttggtggcggcggcattgagcttgcgcacgatctcggccggtgtcctggccggcaccatcatgccctgccaggcgccgacctcgaagcccggctgcacggtttcggcaagggtgggcacgtccggcaactgggcgctgcgcgtggtgctggtgacggccagcgcgcgcatgcgcttgtcgcggatgaagggcagcgatgaattgatggtgtcggccatgaactgcacctgtccgctggccaggtcggtcagtgccggcgcgctgcccttgtagggcgcatgcactgccgacagaccgttggcctgcaggaacatgaaggccgccaggtgcgtcacgttgccgttgccggccgagccgtaggtgagcttgtcggggttggccttcaggtactggatgaactctttcacgttctgtaccggcagctgcgcgttgacctccagcaccagcggcaccattgccgtcagcgccaccggcgcgaaatcgcgtttcacgtcgtagctgagcttgcggtagagcgccgggctcagcgcgatcgacgaggtgttgtacagcaccgtatagccgtcggccggcgccttggcgacgatctccgcgccgatattgccgttggcgccgggccggttgtcgaccagcacctgctggccgagcgtctcgctcatgcgccgtgcgatcacgcgcgacaccaggtcggtcgggccgcccggcgggaacggcaccaccatgcggatcgggtgcgacgggtaggcggcatcggccgccgccgccggctgcgccagcatcgccggcaatacgatggctgccgcggcagccagtgtcgtgatgaaagtctttgccttcatgtgcttgtctcctccatccatgcagccacgcggcggatgccgccgtgggttcagcgtcccgccagcaaccggcgcgcggtgtaggtcatgacctgctccccgcgctggttgaacacctcgatgcgcgaatccaccaccgcccggccgttgcgcgaagtggggcggatgccggtcacggtcacggtggcgtggatggtgtcgcccaccaccaccggggcgtggatctgctgcgtgagttccagcatggccagcccggtgccctggatcatggtctgcaggatgaagccctcgatcagcgtgtaggtcagcgccgccggcaccggccggccctggatggcgccaccgtcatagccggcttcgatgaagatggcctcgaccatgccggtgacggagatgaaattgaccaggtcggtctcggtcacggtacgggcgaaggtgcggaaggcctggccctcctgcaggtcctgccagtagaagccctggccgaggcggggcagttctgcatgcttcatggtgtctccttggcgggtgcgcagcgtgcggcaccgcttagttgcaattgcgcgatcgcttctgcggacagtcccgcctgggccagcacgctcgcggtgtgctcgcccagccgcggcgggatgcccagcggcgcgcgctggctgtcgaaacgcaccggcgcgccgggaaaacgcagcgtgcccatggccgggtcttcgacggtttcgaagaagccagtggcggccaggtgcggatcggccggcaggtcgtcgagttcattgatgcgcgccaccgggatctgcaggcgttcgcacaggtcaacccagtgcgcggtggtctgtccgtgcacgatttcgccggtgagctcgtacagcgtctcgatatgccgcgtgcgtgccgcgatgtcggcaaagcgcgcatcggcggccagctcggggcgcccggcggcgtggaagaagtcgcaccagtgcgcgtcggtgtacggcatcatgcagacatagccgtcggcgctgcggtacgggcggcgcagcggtgccagcacgcgcggatagccgctggggccgcgcggcggctcgaaatggcggccgtagaagtgctcgaccaggttgaaggcgaccatggattcgaacatcggcacttcgaccagcgtgccgtggccgctgccgccatcggcattgcgccgcgcgcgcccggccagcgccgcgcagaccgacagcgcggccaccagcccgctggtcttgtccgcggcgatggtagggaagtagcggctgtcgccggtttgcgccgccatcagcgcggcattgcccgacaggccctggatgatgtcgtcgtacgccgggcggccgccataggggccttcctcggcaaagccgagcaggctgacaaagaccagctccgggtggcgcgcccgcacgtcgtcgggtgccagccccagtgcggccagcttttgcgggcgcatgctgtgcatcagcacgtcggcgccggccagcacgcggtccagcgcggcctgcgcggccggctgcttcaggtccagcaccacgctgcgcttgctgcggttcacgcccaggaaaatggccgccatgccgggctcggcggcggggccggtgcggcgcgtggaatcgccttcgggcggctcgaccttgatcacctcggcgccaaggtcggccagccactggctggcatacggccccatcaccacggtggacaggtcgaccacgcggatgcctgcaagcggcagcatgttgtctccgatcttgttgactgtggggcacagggtagatcagcaggcgaggcttggtctaatattagttttttagaaatcgatattcacaggatattaacgagccatggacttccgccagctgcagcagttcgtcgccctggccgagacgggcaacttccaccgcgccgctgaacgcctgcacatggcgcagccgccgctttccatttccatccgcaagctcgaggaccagcttggcacggcgctgttcgtgcgcacctcgcgcggggtgaggctgacgcaggcgggcgaggctgcgctgcacgatgcgcgccgtgcactgttccatgcgcagcaggcacgtgccgccgcgatcgccgcggggcagggcgagcgcggcgcgctgcgcatcggctttatcggctcggcgacgtatgcgctgctgcccaagctgatcccggcgttccgcgcggcgcatcccggcatcgagctgatcctgcatgaatccaccaccgccgcgatcctggaccgcctggaaaagcaccagatcgacgccggcctggtgcgctttccgatcctgaacaccggcaactattcgctgacgccgctggaaaacgacgtctttgtcgcggcagtcccggctgacagtccgctggcaggcgcagacgccatcccgctgcgcgcgcttgcggacgagcccttcatcatgtatccggcggcgcaggtgcccaacctgcacgcggtggcaatgctgctgtgccagcaggcgggctttgtgccgcgtgtcacgcaggaggcggtgcaggtgcagacccaggtcagcctggtcgagagcgggcttggcgtggccctggtgccgagcgtggcggcgcgctacgccaaccggcgcgtgcgcttcctgccattgtccagcccgcggccggccgggcgcatcggcattgcgctggcggcgcggcccgatgacggcgaccgccaggtgcagcgcttcctggcggcggcgcaggcggcagtgaactgatgcggggtggtgcggcgcctcaggcggcgcgcgggcgcggcgcgcgcggccgcacagccggggtcacgctggcgcgctccaggttcacgcccggcagcaggtgcagcagccgcaccagctctgactggcgatgcgtgccggtcttgcgcagcgtgtcgcggatatgcacgcgcacggtgtggggagagagaaattcgcgctcggcaatctcgttgagggtttcgccggcagccaggcggaccgcgataatgctctccttgcgcgacagcccgaacagcgaggtcagcacgccggcatccagcaccgagcgcgattccgagttgccgaacagcatcatcgcggccggcagctgccacgggccctccaccggctggcgcgacaccagcggcgtgacgatgatcggcaccggctgtccgccggaggtgatgtgcatccacgagccggaggccgcctcagtgccgcgcgcgcgcatggcaccgtcaagcagcttgcgcagcaccgcctgcagggtctcgctgtgggcgcgcagcacgccgccctgcagcgacaggtggccgtcggcctgcaccagcgcctcggcccagctgttggcatagcgcacgcgcaggtcggcctgcagcaccatcacgccgaagtccagcgtatccagcccggccagtcccaggctggccagtccgctcagctcgaagttgcgctgctgcatccgtgccgcgcgcacccagtgcggcatcacgtgggccaggcgccgctcgcgctggcccacgctgatgctgcccgcgctggtgccgctcatcagcacgcaaacctcggcgttctcgatcaggcggatgccttgttccagtccgctgcaggccagcgcagccgtggccgcatccgccatgccgccatggtgcgaggccaccagcgcggcggcaccgtcgcaggccagcgcgggggcgtcattgggggcgcagcaagcgcccgcatggggcaggtcgagcggaccgggcagccagtcgggcatgctggcgccgctggtgaagcagccgtgcggggtcacgccaaggcgggcgtggccggccagcttgtcccagatcaggtaacgcgggctgcctgtgcaggtgtatcgggaaaagaggtcgagggcggcgggcatggccgcaacgtccagcgcggactcgtagattgagtcgaccagacgatggaagtcctcgtccgtagtcgggtgttcgcccatgttcagatccccccggtggcaaacgcctattgctctgtgccacggcaagtggctacatctttttgtgttatcggttccgttctggcgttctgcatctgcgccgatacggatgctgctggcggcgcgcattgtcccgtcatgtccgccgtaacgcaatcatgccaaacaatgttgtttgttttatcccccgtatcgggggggaaaatacggattgcacggcgtaactccccgccaggccaggcagggacgtgatcatgccgcagcgcgatggtagcgccccggaaaaaaaggaattttcagcactgaaatagtgcgcgacgttccacatgcgccacgattctgttggcgcttgtgccacaggttcaacgcagcaagagcacagtacttgcttgggtgacagcgttggcataataatgcagtcattgactgcattaatgagggcaatcatgccgatcctgaccgttagaaatgtgcccgacgacgtgcatcgtgcgctgcgggtccgtgccgcccggaacggacgcagtaccgaggctgaggtgcgtcagatcctggccagcgcggtgatgccgcagaagcgcgtgcgcctgggcgatgcgctggcgatgcttggccgcgagatcggcctgtcgaatgcggacgttgaagcgatcgggcagggcaaggacaaggcagcggccgagccggtgaggtttgaatgatcgtcctggataccaacgttatttccgaggccatgaagccggaaccggccgatgccgtgcgcggctggctcaacgaccaggccgccgagaccttgtacctgtccagtgtgacgctggccgaactgctgttcggcatcggcgcgctgccggcggacaggcgccgcgccatgctggccgctgcgctggacggcctggtgacgctgttcgaagggcgcatcttgccgttcgacacgaatgcggcccggcactatgcggaactcgccgttgccgccagaagccgtggccgcggccttcccgcgccggatggctacatcgccgcgattgccgcggccaacggcatgatggtcgcgacacgggacgtgtcgccctttgaagcggccgggctgcaggtgctcaatccgtggcaggcgccgcctccgtcgtgaaggggaacgcccgcgccaaccgcgttgctactgtccctgaattgtcggatcagccgcccgttgggtggctttttcgttggcggtttccggatccagcagttgcgccgcgccgccatccacctggatcgtcaggctcggcgatgccatgcggatgtcgttggcgtcgaaattgcgcttgagccgcgcattgaaggcgcgcgtgatctcggcctgcatcagcggccgggtcttgaactgtgccatcaccaccgggccgttcgggtcgaaccggtccagccccaggacgtccagccccgacatcaggttgcgcgcgtagcgatggtcacgcgccagttcggcgccggtggtgcggatcagctccagcgcctggtccaggtcgctctggtaggtgatgccgatgttgaacaccgcgtagccatagccgcgcgacaggttcttgactgccttgatctggctgtacggcagcgtgtgcagcgcgccgcggccgtcgcgcagcttgaccgtgcggatggtcatggcttcgaccacgccggcgtggtccggcagctcgatcgagtcgccgatggcgatggagtcctcgaccacgatgaacagccccgtgatcaggtcctgcaccaggctttgcgcgccgaagccgatggccaggccgaccacgcccgcgccggccagcagcggcgtcacattgacgcccaggttggccagcaccgcgatcaccgtgatcaccagcaggccgatgaacgaggcgttgcgcaccagcggcaggatggtcttggcccgcaggctgggctgcgcgccgcgcccgtgcgccggcgacagtgattgcatgatggcggtgtcgatcagcagccagaccagccaggccagcagcacggtgctggtgacgctgaagaccgtctcggtgagatggcggcccgcggcggacgactcggccaggcgcaccagcgacgtgccccagacgcgcatcaccatctcgatgaagaccgcccagatcagcacgcgcaccagcgccagcgcaaagcgcccgaagcgctgcaggtaggccgagcggcggcggtcgcggatgcgcggcgcgcgcgcggtggccttgggcgagtgccccaccaccatcgtcagcagcagcccggcgaggaacagcgccaccgatgccaccgtgcggcgcaggaacacatccgcattgccggtggccaggatggtgccgaccaccgatgccaccaccaccgccagcaccggcaggtgccaggcctggccggccagccgcagcaggtcggtcacggccgggcgggcctggcggaaggccagcggccgctgcccgatcagctggccgatctgccggcggaaacacagcgcgaacgcgccgatgcccagtgccgcggcgatattggccacggtggccaccagcgcgcacaggttggtgccgagcacggcgatcacgcggctgtcggtggcgccgtcgcccagtgctgccagcgcccctgtgcagaacagcagccacggtgagtgcgccagcagttgccgcaccgccagctgccggtgcgcggtgcggaacagcgtgaagatgacctggcacaccgctgccgcgatcgcaccggccacgatcgcatacgccaccagcacggcggcgacgctggctggcgattgggcaaacatgtgttgggccagcagcaacgtcagcccgaatgccaccacccacggcccgatatggcgcagcatgaagacgccgacgtcgacccacgatggcagctcgggcagcttgccgcgctcggcgcgcgtgggtttgcccgcgcgccggcgccggatgcggtggccgatctcccacaaggccccgccgctcaccgcccagactgtcagcaccagcgcgaattcacgcagcgaggccagcgtcgtgccggtgccgttgtggctgagcgcggcgtgccattcctcgcccgcgaagcgcgtgcgccagcgccagaactgccacgggccgcgatcctcgcgcagatgggaatcgacttcgtccagcacttcagcgacggcaccgatcaggccgggcgcggaggcgccggccggggctgccgcggcggaggcgggcgcggccccggaggcacccagcccctggcgcatggtttgcagctggcccaccagggcgcgccgctcgccgtcgttctgcagcgtggcgatcacctggtccagcgactgcgccagcggcacgctggcggcgggtgcgctggccggcgccgcgggtttctccgccttgcccagcagtgccgcgagggagccggccggggtggcgtgcgccgggatggcgcacagcagcgtcaacagcgcggccagcatggcgagcgcacgcagcaccggctgcaaggcggcatgccagcggtgcgcaggggtgggggcgtggtgttcgggtttgtgcatggttcgtagtcggttgccggtgccgggcggcgccggaatggccgtcgatcgcgtcactgtagcgcatcggtcgcgccgggtgccggagcgcgccgcaggcccgcgccatcctcattcgtcgcttcggacgatgcgtggcaacggccgatccacgaatctcgaccccactccggtacaggcgattcttgcgcctgccggctttatcagaccgcggggccgcgctggatccggccgggccaggaacaagagacaagggaaagacatatggaactcaatgcatcggtatcggcagtggtgacggggggcgcttcgggcctgggcgcggcgacggcacgtgcgctggcagcgcagggcgtgcgcgtggcgctgttcgacctcaacgtggagaagggcgaagcgctggcgcgtgaactgggcggcgtgttctgccaggtcaacgtcacctcagaggccgaggtcgaggccggctttgccagggcgcgcgccgccatcggccaggaacgcatcctggtcaactgcgccggcaccggcaacgccatcaagaccgcctcgcgttccaaggaagcgccggaccagatcaagcatttcccgaccgatgccttcgagcgcatcatccagatcaacctgatcggcaccttccgctgcatcgcgcgctcggccgcgggcatgctgacgctggacagcgccggcggcgagcgcggcgtgatcatcaataccgcgtcggtggcggcgcaggacggccagatgggccaggccgcgtactcggcatcgaaggccggcgtggtcggcatgacgctgccgatcgcgcgcgacctggcgggcgaaggcatccgcgtcaacaccatcctgccgggcatcttcaataccccgctgctgcagggcgcggcagagaacgtcaaggccgcgctggcggcttcggtgccgttccccaagcgcctggggcagccggaagagttcgcctcgctggccgtcgagatgtgccgcaacggctatttcaacggcgagtcggtgcgcctcgacggcgccatccgcatggcgccgcgctgagcgtagcgccagcacatcgtcgtgtccgggccccgcgcaccgctggtccggacactatcaaaatcaggagacgcggatggacttcagctatctgacgacactgccccacgcggtacgccacttcgcgcgcctgcggcccgaggcggtggcgtatgcgttcgaaggccggcagaccacctatgccgggttcgagcggaacaccaatcgcgtggcccaagccctgctggctgaaggcgccggggtcggcgagcgcattggctatatcggcaagaacagcgaccactatttcgagctgctgcttggcgcgtccaagatcggcgcggtgatgacgccggccagctggcgcctggcgccgcccgaggtggaattcatcctcggccattgcgatgccgtggtgctcttcgtcggggcggaatcggcggcaatggtccggaacctgctgcccgcgctgccgatggtgcgcaaggtggtggtgatggagccgtgcgccgggcaaggcgagtggcagtgctacaccgactggcgcgacgcgcagccggacacgccgcccgcgcaccagccagccgcgcatgacgtgctgctgcagctgtacacatccggcaccaccggccggcccaagggcgcgatgctcacgcaccgcaacctgaccatcggcaccgaagtgagcgagcgcgagaacctgctctggtcgcactgggtcgccgacgatgtttcgctggtggcgatgccggtggcgcatatcggcggctccggctggggcctgcgcaacctgctgtccggtgccaagggcgtggtcgcgcgcgagttcgatccgcgcgcggtgctcgactttatcgagaaggaacgcatcagcaagctgttcctggtgccggccgcgatgcagatcgtgctgcgcgacccgcgcgcgcgccaggtggactactcgcgcctgaagtacctgctgtacggcgccgcgccgattcccgcggcgctgctgcgcgagggcatcgaggtgttcggctgcggcttcgtgcagcagtacggcatgaccgagaccaccggcaccatcgtggcgctgccgcccgaggaccacaccaccgaggaagtgccgcgcatgcgtgccgcgggcaagccgctgcctggcgtggagatcaaggtggtcgactatgaaggccgccagctcgcgcccggcgaggtcggcgagctcgtggtgcgctcgcagcacaacatggctggctactggaagcagcccgaagagaccgcgcgcaccatcgacgccgaaggctggctgcgcaccggcgacgcgggctacttggatgccgagggctacctgtacatccatgaccgcgtcaaggacatgatcatcagcggcggcgagaacgtctatccggccgaggtcgaaagcgcgatctacggccacccgcaggtggccgacgtggcggtggttggtgtgccggacgagaagtggggcgaggcggtcaaggccatcgtcgtgctcaagccgggacaggtgccggaccaggccggcatcatcgcgtggacgcgccagcggctggcgggcttcaaggtgcccaagagcatcgagtttgtcgaggcgttgccgcgcaacccatcgggcaagctgctgcggcgcaagctgcgcgagccgttctgggaagggatgaaccggcgggtgaactgacgccggcaagcagcaagcacgagcccgccgtcactggcgggcttttgcattggcgcgcagggagcggggcgcccgctataatccgcgcaggcactgtgccgcctcaccacgtccactcgcaatattgcgcgaccacatcccccagccatgtccaaggaccccgcgcaagcccgcctgacccgccgctatgtcgaaaagcgcgaggccatcctggacgccgccgcgcggcgcttcaaccaccagggcgtacggggcaccaccttgtcggatgtggcggaggacgtgggcctgagcaccaacagcatcacgtactactaccgcaagaaggaagacctggtggtggcgtgcctgctgcgcgccatcggcgagatggtggacatcgctagtgcggcccagcagcagccggcgccgcgcgaacgggtaaaggccttcatcgcgctgttcttcgagcgcctggcgcgcaccgccaccggcgagcggcctgaactgatgagttttcgcgagatccgggcgctgccggacagccatgccgatatcgcattcgacgcctacaccgacatgttccgccgcatccgccagctgctgcgcgagcgcccgccggccgatccggcgcagcgcagtgcgctgagcgcgcgcgctcacctgctgctgtcgctggcgaccggcgcgatgtcgtgggtggagcgctatgagcccgaggactatccgaaggtggcgcagaccgtggtcgacgtgctgctgcacggcattgccgcgccgtcggcccgctggcatgcgcagatggacgtatccgcgctgctgcctgcgccggacaggcccgagaccacgcaggaggcgttcctgcgcgccgcgaccgagctgctcaacgagcagggctatcgcggcgcgtcggccgaccgcatctcggcgcggctgaacctgaccaagggcgcgttctatcaccacaacgagaacaaggacgacctgatctcggcctgcgtcgaccgcatgtttgcagtgatccgcaatacccagacgctggtggagaacggcccgggcactggctgggacaagctgtgcgcggtgtcgcgggcgctggtgcaataccagttctccagccaggggccgctgctgcgcctgaccatctatggcgcgctgcccgaggacatgcgcaaggagaagatgctgaccatgagccggctgtcggcgcggatcgtgcgcttcctggtgctgggcatgcaggatggctcgatccgggcactggaccagtccattgccgcgctgcaggtcaacggcatgatcaatgccgcggtggagttgtcccgctgggtgcgcgatgcccatgcggacaacgccgctgacctgttcgtgcggccgttgctgatggggatcctctcggagccctgagcgctagcacacgctcaagtgtagaggtggcaggccaccatctggccatccggctgcgcctgcagcgccgggtcttcgctgcggcaacgcgccatcgccaccgggcagcgggtatggaagcggcatcccgacggcggattcatcgggctcggcacctcgccctgcagcacgatgcgcttgcggctgcgctcgccttccacgctggccaccggcaccgccgacagcagcgcctgggtgtagggatggcgggggcgggcgtagagcgcctcgcggctcgcgatctcgacgatgcggcccaggtacatcaccgcgatgcggtcgctgatatgccgcaccacggccaggtcgtgcgcgatgaacaggtaggacaggccaagccgccgctgcagcgacatcagcacgttgaccacctgcgcctggatcgacacgtcgagcgccgacaccggctcatcgcagacgatgacgctgggcccgagcgccagcgcgcgggcgatgccgatgcgctggcgctgcccgccggagaactcgtgcgggtagcggtccgccatatagggcagcagcccgaccatgtccagcaactccgccacgcgcgcgcggcgggcgctgcgaccgccggggaaatcatgcacctccagcggttcgctgatgatgtcgctgaccctcatgcgcgggttcagggagccgaagggatcctggtagaccatctgcacgctgcgccggaattgctgctcctgcgcccgcgtgaagctggccaggtcggcgccgcggaaggcgatgcgtccggcgctggcggccagcatcttgaggatggcaagcccggtggtggacttgccgcagccgctttcgccgaccaggcccagggtctcgccacggcgcagcgtgaatgacacgccgtcgaccgccctgaccgagcccacccggcgcttgagcagcacgccgcgcgtgaccgggaaatgcaccttgaggtcgtcgatgcgcaggatctcatcgccactctgcacgtcggcccgcacgtcatgctgcatgcccgcctgcacaccgccgttgcccgttgccggctccgctatcgcttcaatggagttcatggaggaagcacgccttgaaatgttggtcggaaagctgccgcgtggccgcgtccggcacgccgagcaacggcggccgggcgctgcggcactggtcgatcgcctgcttgcagcgcggcaggaaggcgcagcccgggcccagcgcagtcaggtcgggcggctggccttcgatgggaaccagcggctcccgggtgtcgccgtcaatgcgcggcacggaggccatcagcccgcgtgtgtaggggtgggcgggctgccggtacagggcctcggcggaggcggtttccaccagcctgccgccgtacatcacggcaacccggtcggcatagcgcgccaccacgcccaggtcatgcgtgatcaggatcagtgccgtgcccatgcgctcggccaggtccttcagcaggtccaggatctgggcctgcacggtgacgtcgagcgcggtggtgggctcgtcggcgatgatcagccgcggctcgcaggccagcgccatggcaatcatcgcgcgctgccgcatgccgcccgaaaactggtgcggataggctgaaagccggccctggggctcggggatctggaccttgccgagcagctcgccggccatccccagcgcggtcttccagggcaggccgcgatgcaggtggatgggctcggcaatctgcttgccgatggtgagcgccgggttcatcgacgacatcggctcctggaagatcatcgcgatccggttgccgcggatggcacgcatgccgcgggggccgagcctgagcaagtcctggccctcgaacacgatctcgccggagtcgatcgaaccgcccggggcggggatcaggcccagtatcgacagcgccgtcacactcttgcccgagccggattcaccgacgatggccagggtctcgcccggggccacgtcgaacgagacctggtcgaccgcggtcaccacgccgcgatcggtgcgaaagcgcgtggtgaggtccctgacctgcaggataggctgcgtcatgcgtgtctcctcgggtggcgcggctcagaagccaagcttcttcttcatgtcctggtcgatccacatgcgtgcatagatcggcccgggccgcaccgcgcccgcgcgcagctcgccgccgtagttgcgcacccatggccaccaggcggtgtacatgtagggcgtgggcagccagatataaggcgcctcggccaggatgtcgcgcgtcagcccgcgcagcgcttcctgccgcttgccgagatcgcgcagctcaaaggcggcttcgacccgcttcgtgtaagcgtcgttgccccactgcgcggcgttccatacctgtcccggcacgaagctcttgcggatcgtggtggtgggattggtatggccgttggccatcatgtagccgggcgctttggtccgcgtcgtcatcgcggacaggaatgcgccgtactccatcggctggatctcgatgcgcacattgacctgttccaggtacgcggcaatcagcggcagcagctccatatggtccggcgcgcaggcgcatacctgcaccttgaacttgaagcccttggggtagccggcctcggccagcagcttgcgggccttgtcggggttgtaggtgaagagctccttcacgttctcaggcatggcgctgagcggctcgaagtagccctcgtagtccgggtgctgcggataggcaaacagctccgcgttgccgccgtagtactgcttgacgatctcctgcttgttgaccgccatgttgagcgcgcggcgcacgcggatatcgttgaagggcttggtgtccacgcgcatggccaggtattgcccggtgaaggacagccagcgcgaccactgcagctgcggcgcgctcttcttcagctcttccaccgaggtccagcgtatgccttccatgacgtcgagcttgcccgtgcgcagcatggtgttgcgcgtggcttcatccttgatggtgcgcagtaccatcttgtcgacgaagggcagcttgaaatccttgctgcccaccttctcggtatcccagtacaaggcgttgcgcgtataggtgctggcgttgccctgcacgaactgggtcagctggaacgggccgctgccattgacgtgcttccagttgccggcgccggcggtggccacctccttcggcatgatgccggagtagtagccccagccgaagcggtagtcccactcggcgttgtacttgctgaagcggaacagcaccgtatgcttgtccttcgcttccaccttggccaggtggtcgaaataggtggggatcttcttcgcgctttcggcctggcgcgtgtagctgaagaccacgtcgtccgccaccagttcgcgctcttccatcacgccgggcttggccgggaacctgacgcccttgcgcagcctgacttccagcgtctgcggatcgagccacttccagctttcggccagttcgccgcggatggcgtcctcgggcagccacgcgtcggcctggaagctgtacttgccgccgaggcgcctggacttggacaggtcggccacgaacagctgctcgtagacctggccggtgtcgtagttctgcttccagttccagtcggcgaggtcccatgacagtgccgagatggtcgggtagaccgagccgatctccagcgtgccgccgtatttgggcgcgtcgctctgcgcgttggccgtggccgcgcacaatgcgagcaccacgcccgccaacatcgaggatgcctgtgtgttcaaaccgaagccctccgtggtcgactgccgttggcccggcggcatcgccgccgggagattccgtgccccaccgcgctagcggcaggggactgcaattcgggacaggtgctagcgtgtgccgcgcatgcgcgggtccagcaggtcgcgcagggcgtcgccgtagatgttgatcgcgtagaccacgatggtgaggcagatgcccggcgccagcgccagccaggggccctggaacatgaaggtgcgcccatcgccggacagcatgccgccccaggtcggcgcgggcggcggcacgcccaggcccaggaaggacaggcccgattccgccaggattgccgtgccgacccgggtggtgaacagcacgatcaccgggggcagcacattgggcaggatatggcgccacaggatgcgcgtggtggacgcgcccatcgactgcgcggcgtggacatacatgttctcgcgcaccgagaccaccgcgctgcgcacgatgcgcgagccgccgatgccaagcagcagccccagcgtgcagacgatctgccagctgcccgggcccagcaccgagaccaccacgatcaggatcacgaggtccgggaagctcatccaggcatcgaccatgcgctgcacgatcaggtccagcttgccgccgaggtagccggtcaggatgccgagcagcaccgagatcgccgtggccagcgtggccgcgctcaggccgatcaccaccgacagctgcgcgccgtacaggcagcgcgacagcatgtcgcggccaaggttgtcggtgccgaacggatgcgcccaggagggcgcctgcagccgctgcagcatgctgatctcgttcatgccgtacggcgccagcaggtcggcgaacacgccgcagaacaggaagatggcgcagatgacggcgccggcggcgcccagcggcttgtcgcggaacagccgcctgagcagcccgcggccgggcacggcgcgccggaccggtgcggcagcggccgcgggggcggcgggattggggtgcagggcgggcttggccatcagcggtgcctcactttcggatcgaacagcccgtagctcaggtcaacgagcaggttgatcagcatcaccgcgacacccaccaccaggaatacgccggtgatgaccggatagtcgcgctggtgcacggcgtcgagcagcagcaggcccatgccgggcagcgcgaagatctgctcgatgatgaccgcgccgccgatcagcagcggcgcctgcagcccgatcagcgtcaccaccgggatcagcgcattgcgcaaggcgtggcgcagcaccaccaggcgctcgctcaggcccttggcccaggccgtgcggatatagtcctggcgcagcacctccagcatcatggtgcgcgtcatgcgcatggtgatggcggacagcgccatgcccagcacgatggcggggatcagcatgttgcgcacatgctgcaccgggtcttcatggaagggcacgtagcgggcctcgggcgaccagccccaccagaccgacgggaacaccatcaccatggtgcctagccagaagctggggatggccagcatcaggatggagaacgagcgcgcgatatagtcggcggcgctgtcctggcggatggccgacagcacgccgatcggcagcgccaccgacagcgccaccaccagcgcgatcacgcccagcgagaaggtggcgggaatgcgcgcggtcaccatcgacagcaccggctcgccctgccacagcgactggcccaggtcgccgcgcagcacgatgccgccgacccagtgcacatactgctgccacatcgggcggtccatgccgagggcgcggaccaggtcttcacgggtacgggtatcggcgctgatgtcgttctggctcagcatcaggtcgaccacatcgcccggcaccatgcgcacgatggtgaagacgatcaggctggcaaacaagagcgtgggaatcagcgccagcagccggcgcagcacgtaggcgctcatcgcagccctgccttggcgcggctagccgaaacggaagataccggcaacacgaatctgcatgatgcttggtacatgtcgtctcctgtcttccgatccccttgcatccgccagcaccggatcatgctgctgagggggagtgattttttgatattgcgccagtggcgaaataccgttgcgggtggtcttgcgaggccgtgatcccagcatactgatcgttcgaaacgaaaacaacccgattgccgcgcggaaaagctagtggttttccatggtcccgcggcggtgtgcgggacgcgccggctagtagccgcgcagcgtcgcccagcgctgcaactggacgttggtatcgccgagcagttcctgggcggtgcgtgcccgcttcatgaagaagccgatctccagcgcgtcggtcatgccgatgccgccatgcatctgcacgccctcctgcacggccagagtcgcggtggtgccagcgcgcgccttggccacgcagaccaggccggcggcgtcgtccgtgccggcatcgagccgctgctggcactgcagcacggcggcgcgggtgatctcgatctcggtgaacaggtgcgcggcgcggtgctgcagcgcctggtactcgccgatgatgcggccgaactggcggcgctccttcaggtaggcaagcgtgcggtcgaaggtttcgtcggcgatgccgagcagttcggatgccagcacggcgcggcccacgtccagcacgcgctccagcatggcggcgccattgccgggggtgcccagcacagcggcggccggcagccggacctcgcgcagggtcacgcgcgccgcattggtggcgtcggccatgaccgtgcgctcgatcgagaggccggcgctgccggcgggcaccaggaagagcgtgatgccgtcgcggtcgtcgcgcgcgccggcggtgcgcgccgccacgatcagggtgtcggcgacgtggccatcgacgacaaagaccttgtcgccatcgaggcggaagccgtcgccgtcggcgcttgcgcgcagggcatggcgcgtgggccggtgcctggcgctctcttccagtgccagcgcggtcaggtgctggccggcggcgatggcgggcagcatcgccgtgcgctgcgcatcgctgccgtagtggctgagcagcgccgcgcccagcacggcggtggacaggaacggcgagggcgccagcgtgcgcccgatcgcttccatgatgacgccggcctccactacgcccaggccgctgccgccatattgctcgggcaccagcacgccggcgaagccgagttcagcgagctgctgccacaaggcgcgggagaagccggtctcgtcgcgggtatcgcgcagcatgcgcagcgcggagatcggggcggattcgcgcaggaaggtcagggcgctgtcgcgcagcatttcctgcgtctggttcagtacgatgggcatgggcggactcgtgtctgggtacggggcagcggggggaagcgcacggggccgggctcaggcgcccggcaggccgagcaggcgcttggcgacgatgttgagctggacctcgctggtgccgccctcgatcgagttcgccttgctgcgcagccacgcgcgtgccagcgcgccctgctggctgcgctcgctttcccattccagcgcgtcgctgccgccgattgacatcagcagctcgtagcggcgcttgttcagttccgcgccgtagtacttgagcaccgacgagaacgccgcgatgccctcgccctggcgggccaggtcgcgcacccgctcgccggccgcggcaaaggcggcttcgtcgatctcgaactgtgcgacgcgtgcgcgcagcatcggctcgtcgagccggccggcggcgtccagcccgatggcctttgccgcatgcgcgccaagcggctgccgcatgccgcggctgccgatggcgctgatcatctcgcgctcgtgggtgagcaggtacttggcaatctcccagccgccgttgagctcgccgaccagctgtgcgcgcggcaccgcgacgtcgtcgaagaaggtctcgcagaagggggatttgccggagatcagcaggatgggccgggtcgtcacacccggcgtttccatgtcgaacagcaggaagctgatgccggtgtgcttttgcgccgcagcatcggtgcgcaccaggcagaagatccagtcggcctggtcggcataggacgtccacaccttctggccgttgaccaggaaatgatcgccgcggtcctcggcgcgggtctgcagcgcggccaggtcggaaccggcgttgggctcggagtagccctggcaccagcggatttcgccgcgggcgatgcggggcaggtgctcgcgcttctgggcttcggtgccgtacctgagcagggcggggccaagcatggagatgccgaaactctgcagcggcacgcggcagccgagccgggccatttcctcgcgcagcaccttggcctgctcgcgcgccaggccggcgccgccgtattccgtgggccattcgggcacggtccagcccttgtcggccatgcggccaagccactgtcgctgggcctcggactggaagcggaacctgcgcccgccccagcagatgtcgtcttcgttgcgcaccggctgccgcatctcggccggacagttctgctccagccaggcgcgcgcttgctgccggaaggtctccaactcgtccacgcgtgtctccttgtgctcaggtgcctttcgctggacgcctctttctctggcgcgctgccggtgaggtcgcccgcacctggctggtcggccaggcggcgtatcccgttatacaagtcgcatctggcagcgtcaatactcaattacctaaaatggatgtggccggagcagcggccggatctccgatgtgcgtgcattgcaggccatgggtcatgtctgaggttgcgctgcagcacgaaaaatccggggaaataagcggtaattcgacgtagtcatccagtgaaaggaaggccgggcgttgaagatgtttcctgtggtagcatccattcaaaacatactgctatcactaaaaaacgggatgcgccggttgcgtgcgatgccggacaggcagcttgccaacgcagaccggtgccatagggagaccaagccgtgcccgtcgtcatgccttcgctcgaccagcgaaccgtttcgtatcccggtgcccgggcgccggaccgcgtgcgctgggtggattcaggcggcacaggtctcggcgcatgacaggcgagcggacccccgagcgggtagccggccccgacgaggggcctgacctgagcgcgcatgaacaggctgagcggtgctatctccagcatgtcgaccagcacctgccgcgcaacgcccgcgcgtacctggcgcacggcatgctgggcatgaccgggttccggctggtgaccgcgcccaccttcgtgccggcctacctgtacctgctgtccggctccaagctgactgtcggcatcgtgctgtccgcgcaatatgcgggcatggccgcgtcgtcgatctggggcgccacgctgatcgagcaccgcccgcgcgtcttgccgctgatctatctggtgggctggctggtgcgcgcgcagatcctggggctggcgctgtcggcgctgtggctgtcgggcgaggcggcgctggtcgcggcgggcatcttcctgctgctgttcgggctgctcaacggcgtgcagaacgtcagcttcaactacctgacctccaagatcatcccactggcgcgccgcggccggctgaccgcgctgcgcaatttctgcggcgggctcaccgcggccgcggtggcgtggctgggcgggcgctacctggtgggcaaccaggtgctgggcaacggctatgccgccaccttcctggcggcctttgtgctgaccagcatcggcatttcagcgctcacgcagatgcgcgagccgaccctgcacgacgtgcgcctgccggcgggcttcctgcgccgcctggccgaggtgccggcgctgctgcgtgcggaccgcgatttcgtgcgttttttcgtggcgcgcgcgctggtggcgtccggcatgatggcgatgccgttctatgcgatctatgccggcacccatatcgacctgtccggtgcggtgctgggctacatgagcctggcctacctgctggcgcagaccaccagcagcctggcctggggccgcatcgccgaccgccacggctaccggctggtgttcctggccagcatcgcgctgtgggtggcggcaacgctgctgctgttgtgcggcaccacgctgcccggcgtcctgcttgccttctgtgggctgggggccgcctttggcggcttcttcatctcggctgacaacctcgtgatggagttcggcagccgcaaggaccggcccatgctgctggcggtgtccgataccgccacctacgcgatgatggccatcggcccggtctgcggcggcctgctggcccagggcgtgcgcttctgggtggtgttcgcgctcgccatcgtggtcaagtgcgccgccttcgtgctggccctgcgcattgtcgacccgcgccggcgcagggcggcgcttgagcatccgccgggcctgcaccggcaccccacaccgattcaatccaggagaaccgatccatgaccgccatcaacgccgtgaccgacctcacggtggacgccgacatcgccgtcctgagcctcgactcgccccccgtcaatgcactgtccgccgccgtgcgcagcggcatccgcgacggcatggcgcgcgcgctcgccgacgatgccgtcaaggccgtggtgctgatctgcgccggcaagacctttgtcgcgggcgcggacatcaccgagtttggcaagccgccggcgggcccgtcgctggcggaggtgcaggccatgatcgaggacgcgcccaagccggtggtggctgccatccacggcaccgcgctcggcggcgggctggagctggcgctggtgtgccactaccgcattgccacgcgctcggcaaagtgcgggctgccggaagtcaatctcggcctgctgccgggggcgggcggcacccagcggctgccgcgtatcgtgggcccggaacaggcgctggagatggtcacctcgggcacgcacgtggcggccagcgcagcggcggagatgggtctggtcgacctgctgaccgatgacgcctcgttgcgtgccgacgcggtggcgttcgcacgcaaggtggtggccgagaagcggcccctgcgcaaggtgcgcgaatccgatgacaaggtggcggccgcgcgcggcaagccggaactgttcgctgccttccgcaaggccaatgcgcggcgctttcgcggcttcgatgcgcccgagttcaatatccgctgcatcgaggcggcggtggagctgccattcgaagccggcctgaagcgcgagcgcgagctgttcaccgaactgctcaacggcacgcagtcggcggcccagcgctactacttctttgcctcgcgccaggtatggaacgtgccggatgtgggagccgacacgcccgcccttgcggtcaggcgcatcggcatcgtcggcgcgggcaccatgggcggcggcatcgccatgaacttcctcaacgccggctatccggtgaccatcgtcgagtcctcgcagcaggcgctggaccgcggcctgaagacgatccgggccaactacgacaacaccgcgcgcaaggggcgcctgagcgcggccgatgtcgaggcccgcatggcgctgctcacgcccacgctggacctgcagctgctggccgatgccgacctgatcatcgaagcggtgttcgagaacatggaggtcaagcaggagctgttcggcaagctggaccggatcgccaaagcgggcgccatccttgccaccaatacctcggcgctggacgtgaacgtgatcgcggccgcgagctcgcgcccggaggcggtcatcggcctgcatttcttctcgcccgccaacgtgatgaagctgctggaagtggtgcgcggcgacaagaccgcaaagccggtgatccgcaccgcgatggaactcgcgcgcaagatcggcaaggtcgcggcgctggtcggggtatgcccgggttttgtcggcaaccgcatgctggcccagcgccagcgcgaggcccagaagctggtgctggacggggcgctgccgtgggacgtggaccgcgtgctgtacgacttcggctttccgatgggccccttcgccatgagcgatctcgccgggcttgaccttggctgggtgcgcgagaagtccagcggctcgacgctgcgcgaggtgctgtgcgagatggaccgccgcgggcagaaggccggcgccggctactacgactacgacgaacagcgcaacgcgaagccgtcgccggtggtcgagcaggtcattcgcgacttcgccgcgaaacagggcaggaacagccgcgtggtgtcggagcaggagatcctggatcgctgcatctatccgatgatcaacgaaggcgcgaagatcctgcaggaaggcaaggcgattcgcgcctcggacatcgacgtgatctgggtgaacggctacggctggccggtgtatcgcggcggcccgatgatctatgccgacaccatcgggctggacaaggtgctggcggcaatgcggcgctatgaggcgctgtatggcgcggacttcgcgccggcgccactgctggaggaactggcggcgcaggggcgcaggttcgccgatctctaaggcagcaagggctgcctcggccggccggtgccatgcgccggccaggcgcttacttcttcttgaccacgctgaccttgccgtcggcctccaggtacagcgccttgacctcgtcgatcgattccagtccctcctgccggtacttggcttcgagctcttcgtcggtgatggattcgcgccgcatgttctcgcgcagcttggtgccattgcgcaccagcagcaccttcctgggttcggcaaagcgctggaaagcgggggagtggtaggccagcaggtcgatcagccggttccaggcgatcagcgtgaccactagcagcacggcatcggcgacgctctcgccgttgcctgccatgccgttctgcgcggcgtcggcgacgatcaccaccaacagcaggtcggcgatgcccagcgagccgatgtcgcgccggaccacgaagcggaacagcaggaacagcacccagtacatcaacgtgccgcgcacgatgatctcgagcggggacagggtcaggaggagggcttcgcgccagtcgaacgacaggtccatgcgcgctacccagcaacttccgggccactttgcaacgatggcggctgtggcgcgggagtcgccgcgccgcgggtaattcttacacctggcgcgtacggtttgctgcgctgaaagccaggcgtcccgcacgcggcggggacgcccggcggtccggcctcaggctagtccgcctggatgccgaactccttgaccaccttggtgtagcgggcggtgtcggcggcgatcagcttcgacagcaccgccggctcgccgcccgcaggcgtgaccgcgatggtggccatgcgcgccaccacgtcgggcatcttcaggatctcgttgacgtgcgtgttgagcgtgcgcaccaggtcggccggcatgcccttcggtccgagcagggcctgccaggcgccgatttccacgtccttgtagcccagctcggccagcgtcggcacgttgggcgcgaacggcgagcgcttctggtccgcaaccgccagcggcaccaggctgccgttgccgacatactgcgagattgcgccataggtgatgtaggtcaccggcacctgcccgccgatcacgtcgacgatggccggcgccaagccgcggtagggcacctggctgatcttgatgccggcggacttgttgaacatttcgcccatgatgtgcatcggcgagccattgccgggcgtggcataggtttccaccttgccggccttggcgcgcgccaccagctcgctgaccttggtgatgccgctgcccttgttgacgaccacgaacagcgactgcgtgccgatctggctgatgggagtgaggtcgtgctgcacgtcatagctggcgccggtgccggccttgagcaccagcggcgcgagggcgacggtgttgggggccagcagcagggtgtagccgtccgggttggcgcgcgccacgtaggcgctgccgatggtgccggcggcgccggtgcggttttccaccaccaccgactgcttcaggcgcggggcgagcttttccgcgaacaggcgcgccagcacgtcgacgtcgccgccggccggataggctacaacgatggtgatgggcttgttcgggtacgcaccctgggccagggcggtgccgccggtggcagcgaccagggcggtcgcggcggccagcgtggcgagtactttgcggcgtacggacttcatgatgttcagacctctgtaagacgtggcgcccggacgggccggggccaatggctgtgttggcgtccggcgccttgcatgcgccggacggtaccgccggggggcgcggaggaaatcagaaaacgtgcttgatgccgatcatcgagccccactggttctcgcccgggcgcgggttcgagccaggcgagccgccgctgaccgacatggccagctggccgccgttgttgatgaagccggcggtggcgtacaccgaggtgcgcttgctgaagctgtacatcgcgcgcagcgtatacagcatggcctggttgtcgctgccgtggtagttcaggaagtagacctggccggccaggttgaccgcgggggtgatgtcgtaggacgcgccggcgtagtacaggtcgctgatcggggtggggctgccctcgttgtcgcggcggatccagccggcgccgatcttggtgcgctggaacagcatgtagccgccgagagacaggcggtcgtcggtcaggttgctgttggtcaggccgccgaaggcgcccgggccgccgcgctgcgagtcatacgcggcggtgacgccccaggtcttgttgtcgtagccgagcatggccgaccactggcggcacgccttcttgtcggtggcgttctcgccggcgcagttggtgcccgaggggctggggccggcgttgaccgcatcgcgcccgaagctgtaggtggcgcccaccacgaaaccgctgaagttggccttgtatgacaccgcgttgtcggcgcgcgtattgggcaggtagctgtcgagcgagcccgagccgtacacgttgggccccaggacatcgctgtcgagcgtggcccagaacagcatggtgtactggcggccgaacgacagctgcccgtactggttgctcagcccgaccagcgcctggcgcccgaacaggcggccgccctggttggaggtgcccgaatccggcgagaagcccgactccagcacgaagatgctcttcaggccgccgccaaggtcttcagtgccgcggatgccccagcgcgagggcacggtcgcggtcaggttgggcatgcgcaccaggccgtcgccgttggcgccgacattgctcacatactcgacgcccgtgtcgatgaccccgtacagggtgaccgaggattgtgccgaggccagcagggggaaagccgcggccaggcctgcggcgattcgtgcaagtttcatctaccagtttccttccgttttccgttttccgttttgtcgtcttgtagtccgctgccactgcggatggcggctgcggatgctgtttcggtctcttttgtgttttatatatgaaacatcaaacaacataagaaacgtcaagcaaaatatagctgcgagtttccacaagatgtgaggagggttatccctagtgaggcgacgccgcgacggctaacgccggctctgcgcggaggtttccgatctttctatcgttaaccctcatcccggctgggctccgacacgcctatgcttcaaaagttttattctcaaacctaagttttatatatggaacaaaatcagccccacatcctggccgagccagaccggcagttgctggaagccctcgacagcgggtttgcccagcgcgtggtgcaggtgggcgcggacggcgagcgcgtggcttaccgcagcggcgggagcacgggccctgcggtcgtgctgctgcacggcatcagttccggggcggcgtcgtggctgccgtgcgcgagcctgctggccgcgcacgcgcgggtgatcgcctgggatgcgccgggctatggcgattcgtcgccgctgccgcaggcgcggccgctggcgtcggactacgcgcagcggctggaccggctgctgcaggcactgggcgtgcagccggcgttgatcgtcgggcattcgctgggcgcgctgatggcggcggcctatgttgccaacgcgcgccagctgcccgcgcgcctgctgttgctcagcgtggcgcaaggctacggcggcgcgggcagggaggcgcaggcaagggaagtggcgcggcagcggctggaggcgctggaatccctgggcgttgatggcctggcgcaacgcggcccggcccggctgctgagcgaggaagccgaccccggcgcccaggcatgggtgcgctggaacatgcagcggctgaacccggacggctaccgccaggcggtggcgatgctgtgcggcgacgacatccacgcctacctggcgcggcgccccgatgccttgcccacgcagatcgcctgcggcagccgcgatgtcgtcaccacgccgccagcctgcggcacgctggccgaacgcttcggcctgccgttctcgctgatccccgatgccggccacgcctgctatatcgaccaggccgccgccaccgcgcggctgatccgctcggtgctggacgacgccacctgaagccaccgcggcggcgcctgccgccgcatcccgagcggtgtcgcgcagcttgcgccacccgttccagatttcgtatgccgatcgcgggttaaccccagtcaatttttgcggccgcgttgtctatagtcgtacctgtgttcaatatctaaaccagtgtttcattagtaaaacgtagccaggcgatcgcaagaccggtcggcgaggcacgcggaacacggtccccccgctgcaagacatggagcaaagcgcaatggaaagcctctcgtacaacccgaacctggtgccctgggagcgtccggcgccgaacaacgtggcaggcaagggccatatcgagcagcccggcaaggtcgccaacatcgtctggcagacccgcgccgccgcgccgaccgcctatgagaacgcgctgggcgatgccctcgaagccgcgttcgaaggcggcgcgcagaacccgcaggacatcgtgcgcgccttcaatgacgccggcttcctgggcgtggacggccagccctggaccgaagagcgcttcctgtccgaaatgcgccggctgggtgcctgagcccgccccagtccaagtccagcctcgaagcgagaaaaccatggaatcgaacaagcaagcccgcaccgaagcccgcctgaacaccggcctgcgcaactactggtacccggtcgccgcctcgtgggcggtgtcccatgccccgatcggcattacccgcctgagccagaacatcgtgctgtggcgcgacggcgaaggccaggtccacgccctggaagaccgctgcccgcaccgcggcgcgcgcctgtcgatgggctggaacctgggcgaccgcgttgcctgctggtaccacggcgtcgaggtcggcggcgatggccaggtcaagagcgtgccggcggtggaaagctgcccgctggaaggccgcacctgcgtgcgcagctacccggtgcaggagaaggccggcgccatcttcctgtggttcggggaccaggccccgcaaggcgagggcagccccgacgaactgcgcctgccggaagaactggtcagcgaggaacacagcaacttcctgtgcgtggcgcactgggactgcaactaccgctacgccatcgacaacgtgatggacccgatgcacggcgcctacctgcatgcggtgtcgcactcgatggccagcggcgagaagtccgccgtgatgcaggtgcgcgagaccgagcacggcctggtgttcgagaagaccggccagcgcggcgtcaatttcgactgggtggaatttggcgagaccggcacgctgtggctgcgcctggcgattccgtaccgcgccagcgtcggccccggcggcccgttcggcatcgtcggcatggccacgccggtggatgaagaccactgcatggtgttcttctggcgtacccgccacgtgcagggctgggagcgcgacgtgtggcgcttcctgtaccgcaaccgcctggagcagctgcactgggacgtgctggagcaggaccgcgtggtgctggaaatgatggccccgaacgcgcgcgaccacgagatgctgtaccagcacgacgccggcattacccgcgtgcgccgcctgctcaagcgccgcgccgagcaggaagtggccgacgagcccgtcgccatgctgcaacccgccggagccgccagccatgcctgaggcaaacaccaacaacacgctgctggccgggcgcaaggtgctggtcaccggcgccgcgcgcggactgggcctggccttcgtcaaggcgctggccgaagccggcgccaccgtggccatggccgacatcctggccgagcgcctgcagcaggaagccgacgccctgcgcgcccgcggcctgaaggtggtgccggtcacgctggacctgtccgatccggcctcggtgcaggcttgcgccgaggccgcggtcaaggcgctgggcgggctcgacggcctggtcaacaacgccgccgtgacggattccggcggccgtgacgccgccgccatcgacatcgccacctgggaccgcgtgatgaacgtcaacgtgcgcggcacctggctgatgaccaccgcctgcctgccggcgctgcgcgccagcggccgcggcgccatcgtcaacctggcttcggacacgccgctgtggggcgcgcccaacctgcttgcctacgtggcgagcaagagcgccatcatcggcatgacccgttcgctggcgcgtgaactgggcaaggaccagatcacggtgaacgccgtggccccgggcctgacgctggtggaagccaccgaatacgtgccgcagcaccggcacgacctgtaccgcgagcagcgcgcgatcacgcgcgagcaactgcccgacgatgtttgcggcgcggtgctgtttgcactgtccgacctcgcccgtttcgtgaccggccagacgctggcggtcaacggcggctttgtcatgcattgatccaaccgatccactgaaaacagaaggaatccaaatgagcgatctttctcaaccgcaaaacatcaagcgttcctgggaccagccggagaacgcttcgttcgaccaatggatggaaagccgcgtggcgcgcttctccacgcgcaagtacgactgggacgcgctgaagttccaggccgactacgaccccaagtaccgccgcgcgcagatgcgctacctgggcaccggcggcaccggcgtggccgccgacaccaacaccgtgccgagcgagcatttcaccttctccaccatgatcatcccggccggccatgaaggcccgtcgcatatccacaccgacgtggaagaggtgttcttcatcctgcgcggcaaggtcaagctgatcttggaaaaggacggcgagcgctacgagaccatcctgaccgaccgcgacctggtctcggtgccgccgggcgtctaccgcgaggaaatcaacatcggcgaggaagacgcgctgatgtgcgtgatgctgggcgcgaagaagccgatcacgccgacctacccgcccgagcatccgctgacgaagatcaagcgctgatgccggcgaacgtccgtcagcacgcatccaccgaagccatgagcagcaaccccatcccggccacgtccgccgccagcgaaaccccggacaagtacatcgtcccgggcctggagcgcggcctgcgcctgctgagcgagttcagcagcaaggaccgcaccatgtcggcagcggaactggcgcgccgcctgaaggtgccgcgctcgaccgtgttccgcctgctggccacgctggaaatgctgggctttgtcgagcgcgccgatggcggccgggatttccggctgggcatggccgtgctgcgcctggggtttgaatacctggcgtcgctggagctgaccgagctgggccgcccgctgctggagcggctgcgcgacgagatcggctatcccagcaacctggtggtgcgcgacgggcgttcgatcgtctacgtggccaaggcggtgtcgccgcggccgtttgccagctcggtcaacgtcggcacgcgcctgcccgcgcatgccacggtgctggggcgcgtgctgctggaagacctgtcgctggcggagctgcgcacgctgtacccggagacgcagcttgcggtgttttccgagagcacgccgcgcaccgtcgacgagctgcacgagatcgtgcagcgcgaccgcgagcgcggctacgtgctgcaggaaggctttttcgaagccagcatttccaccatcgccgcgcccgtgcgcgaccgcaccggcaaggtggtggcggcgttgggcgccaccatccccgccgcgcatatcgatccggcgcaactggatgcgatggtggagaaggtcagggataccgcgggcgagttgtcgcgcctgctcgactaccgcccgtcgctgcgcagcagcggcgccaaggtggtgaatctgtatcgggagtgaggacaatgtccatgattgaactcggcggcaaggttgccgtcgtcaccggcgggtcctccggcatcgggctggcgaccgtcgagctgctgctcgaagcgggcgccgccgtggccatgtgcggccgcgacgagaaccgactgcgcagcgccgaagcgcagctgcgcgagaaattccccgggtgccggctccatgccgccacctgcgacgtgctcaagcctgaacaggtcgccgcctttgccgctgccgtgcaggccacgctgggcaacgtcgacatgctggtcaacaacgccggccagggccgtgtctccaccttcgccaacaccgaggacgcggcctggatggaagaactgcagctcaagttcttctccgtgatccacccgacgcgcgcgttcctgccgcagcttgagaagtcaggccagggcgccatcgtctgcgtcaactcgctgctggcgcagcagccggagccgcacatggtggcgacttccgccgcgcgtgccggcgtgctcaacctggtgcgctcgatggccaccgagtttgcgcccaagggcgtccgcgtcaacggcatcctgatcggcctggtcgaatcgggccagtggcgccgccgcttcgaggcgcgccctgaagcagaccgccacctggactgggccgcatggaccgcgcgcctggcccagcagaaacatattccccttggccgcctgggcctgccggtcgaggcagcccgcgccatcctgttccttgcctcgccgttgtcttcgtacaccacgggcagccatatcgatatctccggaggacactcccgtcatgcctaatcaacaacagtacgagcaacagcaggtcaccgtcggttgcgccatcacggcgtttctcgagcagtgcggcgtcaaggccgccttcggcgtgatctcgatccacaatatgccgatcctcgacgccatgggcgagcgcggcaagatccgcttcgtgccggcgcgcggcgaagcgggcggcaccaatatggccgatgcctatgcccgcaccaccggtggcctgggcgtgtgcctgaccagcaccggcaccgccgcgggcaacgccgccggcgccatggtcgaagcgctgaccgccggcacgccgatgctgcatatcaccggccagatcgaaacgccttacctggaccagagcctcgcctacatccacgaagcgccggaccagctcaccatgctcaaggccgtgtccaaggccgccttccgcatccgcagcgccgacaccgccatcagcaccatcaagctggccgtgcagaccgcactgacggcgccgaccggcccggtcagcgtggagatccccatcgacatccaggccgcgctgatcgagatgccggccgacctgcagccgctgccggtgccgcagcacgtgccgtcggcacatgcgctggacgcgctggccgagcgcctggccaaggccaagcgcccgctgctgtggctgggcggcggtgcgcgccacgccagcaagcaggtgcagcgcctgctggacctgggcttcggcgtggtcaccagcacgcaaggccgcggcatcgtgccggaagacgatccccgttcgctgggcgcctacaacctgcataagccggtcgaggccttctaccagacctgcgacgcgatgctggtggtgggctcgcgcctgcgcggcaatgaaaccctgaagtacgaactgaagctgccgcgcccgctgctgcgcatcgacgccgacccggccgccgaaggccgctgctacctgagcgactactttgtcagcggcgacgccgcgctggcgctggacgccctggcggatcggcttgaaaagcgcatgcagatcgacccggccttcgccgccgacctgcgccgcgcccatgacaccgccgtcaacagcctggtcgacggcctgggcccgtactcggcgctggtgcaggcgctgcagggcgcggtcggccgcagcttcaactgggtgcgcgacgtgaccgtgtcgaacagcacctggggcaaccgccatctgcgcatcttcgattcgcgtgccggcgtgcatgcgctgggcggcggcatcggccagggcctggcgatgggcatcggcgccgcgatcggtgctgcggcgaccgcttcgggcaagaagaccttcacgctggccggcgacggcggttttatcctgaacctgggcgaactggccaccgcggtgcaggaacgcgccgacatggtgatcgtgctgatgaacgacaagggctacggcgtgatcaagaacatccaggacgcccagtacggcggccgccgccactacgtggacctgcataccccggactacgccacgctggccaagtcgctgtcgctgcgccatgcgcgcgtgagcaacctggccgaggtcggcgccgcgctggaagcggccacggtcgagtcgggcccgttcctgctggagatcgacatgctgtcgatcggttccttcaagaccatcttcgccggccccccggtgaacaaggacaacgaagagccggcgcgcgaacaaaccactgtcaccgcctgagggagaccggagatgctgcatgtgtccatggttggctgcggcgcgatcggccgcggcgtgatggaattgctcaagagcgatcccgaggtggtgttcgacgtggtgatcgtgccggagcacacgatggacgaggcccgcgacgcggtcaccgcgctggcgccgggcgcccgcgtggcgacgcacctggacgaccagcgtcccgacctgctggtcgagtgcgccggccaccatgcgctggaagagcacatcgtgccggcgctggaacgcggcatcccgtgcatggtggtgtcggtgggcgcgctgtccgagcccggcatggccgagcggctggaagcggccgcgcgccgcggcggcacccaggtgcagctgttgtcaggtgcgatcggcgcgatcgatgcgctggccgcggcgcgtgtcggcgggctggacgaagtcatctacaccggccgcaagccggctcgcgcctgggccggcacgccggccgagcagctcttcgacctggatgcgctgaccgaggcgaccgtgatcttcgaaggcacggcccgcgacgcggcgcgtctgtatcccaagaacgccaacgtggccgccacggtgtcgctggcaggcttggggctggaccgcacctcggtcaagctgctggccgacccgcatgcggtggagaacgtgcaccacgtggaagcgcgcggcgccttcggcggcttcgagctgacgatgcgcggcaagccgctggcggccaatcccaagacttccgcgctgaccgtgttcagcgtggtgcgcgcactgggaaaccgggcgcacgcggtatcgatctagtcccggcagccaacgccccacagacttagcaggcaacgacaatgaagacgcaagaagtactccccatctgcatcgcgggcgaatggcgcctggggaccggcgaccgctatggcacccgctatccggctaccggcgaagtggtggcagaactgaacgccgccagcctggcggacgtggaagaagcggtgcagggcgcccatcaggccttcctcaccagcggctgggcccaacgcaagccgcatgagcgcgccgccgtgctgtaccgcgtggccgagctgatccgcgcccagggcgagcagctggcccagcgccagcgcctggacaacggcaagccgatcagcgagacgcgcgccctggtggccagcgccgccggcaccttccagttctttgccgccgcctgcgagacgctggaagaaaccatcacgccgcagcgcggcgactgcctgaccatgagcgtgtacgagccgatgggcgtggttgcggcgatcacgccgtggaactcgccgatcgccagcgaggcgcagaagatggcgcccgcgctcgccgccggcaacgccgtggtggtcaagcccgccgaggtcacgccgctgatggcgctggagctggcgcgcatctgcgaagaggccggcgtgcccaagggcctgctcagcgtgctgcccggcaagggttcggtcatcggcgacgccatcaccaagcatccgctggtgcgccgcgtgtcgttcaccggcggcaccaccaccggcaagcacatcgcccatatcgccgccgacaagatgatgccggtgtcgctggaactgggcggcaagtcgccgaccatggtgttcgacgatgccgacctggaccacgcggtcaacggcgtgctgtacggcatcttcagctcgtcgggcgagtcgtgcatcgccggctcgcgcctgttcgtggcgcgctcgcagtacgaggcctttatcgaccgcctggccgcgggcgccgcgcacctgcgcgtgggcgaccccgccgacgagcgtacccagatgggcccgctgattaccgaccgccaccgcgacagcatcgagtcgtacgtggccgccggcgtggaagagggcggccagctgcgcaccggcggcctgcgcccagacgtggccggcctgcccaacggctatttctacacgccgaccatcatcgaagggctggataacaacgcccgcatctgccaggaagagatcttcgggccggtgctggtcgcaatcccgttcgacgacgaggatgacctgatcgcgcaggccaacgacagcgtctatgcgcttgccgcgggcatctggacgcgcgactacaagcgcgcctggcgcgtggcacgcgccgtgcaggcgggcaatgtgtggatcaacacctacaagcaattctcgatcgcgacgccgttcggcggctggcgcgacagcggcctgggccgcgagaaggggcggcttggcatcctgcagtacatggagcagaagagcgtgtactggggtctgaacgaacaaccgctgccgtgggccaaccactgaacccggcaggctggagagaagcaatgatcaaggtattggggatcgacgagatcgtctacggcgcggatgactttgacgcctgccgtggctttttcaccgactggggcctggccatcaagcgcgacgatgcgcagggcctggattttgaaacgctgaacggctgccgcgtgctggtgcgccgcatcgacgatgccacgctgccgcccgcgatcgaggccggcccgacgctgcgcgaagtggtgtggggcgtcgagtcacaggcctcgctggaccagctcgccaaggcaatcgctgatgcaccgggcttcgtgaagcaaggcgagggcgatacgctgcgcgtgggctgcaccgatccgaacggcctggccgtgcgtttccaggtcacccgcaagcatgacgtgcaggtcgaatgcgcgctgatgaacacgtggaacgacaagccgcgcctgaaccagcgcagcccgatctacgaccatgccaccccgatcgaagtgggccacgtggtgttcttcgtcaaggacgtcaaggccactgagcgcttctatgtcgagaagttcggcttcgtgccgtcggaccgctacccggaccgcggcgccttcctgcgctgcacgcccgaaggcggccaccacgacctgttcctgctgcagctgccggaaccgaagagcggcctgaatcacgtcgccttcaccgtgcgcgacatccacgaagtcttcggcggcggcatgcatgtctcgcgcaagggctgggatacgcagctcggcccgggccggcacccgatctcgtcggcctacttctggtacttcaagaacccggccggcggcctgatcgagtactacgccgacgaagaccagctcgacgaacactgggagccgcgcgctttcgagccgggcccgaccatgttcgccgaatgggcgatcgaaggcggcatcgacggcaacacccgccgccagaagaacgcgggcggaccggcaggcaagttcctgaccgagaagcggtaagtcagcagcaatcgaaggaagcagcaatgagtgcccaccagtccctgaccctgcgcgtccacgccatgcgctatgaagcgcgcggcgtggtcagcatcgaactgcaagatcccgaagggaagaccctgcccgagtacagcccgggcgcccatatcgacctgcacctgggcaacggcctggtgcgcagctactcgctgtgcggcgcgcccgaagcgcgccggcgctataccgtgggcgtgctgctggaccgcggcagccgcggcggttcgcgctacgtgcatgagcagctgcgcgtgggcgccacgctgaccgtgggggcgccgcgcaacaacttcgagctggacgaaagcgccgcgcacaccgtgctggtcgccggcggcatcggcgtcacgccgatcgtctgcatggcgcgccgcctggccgagctgggcaggtcgttcacgctgatctactgcgcccgttcgcgtgccgaggccgcattcgtcgaacagctgtcggcccatggcgatgccgtgcactttcacttcgacgacgaggccggcgtgccgccggacctgaacgcgatgctggccggccaggaggtgcagacgcacttctactgctgcggccccggtccgatgctgaaggcgttcgaggctgcctgcgaagcgcatggctacccgaacgtgcatatcgagcgctttgccgccgacccctcgaccgaggcggtgcaggagggcgagtacaccgtgtcgctgtcgcgcaccggcaccaccgtcaaggtgccgtccggcaagtcgctgctggacgcactgctcgatgccggcgtgcagatggactacagctgccgcgaaggcgtgtgcggctcgtgcgagaccgcggtgctggaaggttgccccgatcatcgcgacagcgtgctcagcaacagcgagcgcgccagcaacaagaccatgatggtgtgcgtgtcggggtgcaagggcagcaagctggtgctggacttgtaatttcgcgattgtgttctcccctctcccgcgcgcgggagaggggcgggagagagggccagcgcacgccgtagccgatgcgctgtcgaatcccgactgcctcttcccaggccgccgggcaagccgcggcatctgccgttatcaagtgcctgccctctcccccggcccctctcccgcaagcgggagaggggagcaacccccgaagaatcaaaccgagaagccccgtgttaacccagagacaagacgcagcgtcccccggcgcaccggtggccgccaccgcaggtatcgtgaccacggccgacagcgccggccagagcgcggcggcggcccgcagcggcccgctcacgcgcggcaatatcgttgcccgcatcgagcgcatgccgggcaatgccatgcatatccgcgcccggctgctgatcggcctggccaccttcttcgatggcttcgacgtcatcgccatcgcagccacgctgccgctgctgatcgcgcagtggtcgctgacgccgggccagatcggcgtgctgatcgctgcgccttcggtcggccagctggtcggcgcgctgctgttcccggggctggccgagcgcttcggccggctgcgctcgatcggctggagcgcgggcatcatcggcctgatgagcattgcctgcggcttcgcgccgtcgttcgagatcttcttgctgctgcgcatcgtgcagggcctcggccttggcggtgagctgccggtggccgccacctatatcaacgaagtcacgcgcgcgcatggccgtgggcgcttcgtgctgctgtacgaggtggtgttcccgatcggcctgatggtgtccaacggcgttggcgcctggctggtgccgcactacggctgggaggtgatgtacttcatcggcggcgtgccgctggtgctgttcttcatcctgcgccgcgtgatcccggaatcgccacgctggctggcggagaaaggccgtcttgaagaagccgatgccgcactgcgtgcgttcgaggcgcgcgccaaggatccgctgccgccgccggtcaatgccggcagctacgaccgcatgacccagcacccgcgccggcgcgtgcgtgacctggtcagcaaggcctacctcggccgcacgctggcggtatggatgctgtgggcaacctgcggctttatccagtacgggctgtcgacgtggctgcccacggtctacaagaccgtctaccacgcgccgctgcagctggcgctgaaccttgccgccggcgcctcggtgctgggcgtggtcggctcgctggtgtgcgcgatgattgtcgacaaggtgggccgcaagccggtgatcaacgtgtcgttcctgctgtgcgcgctgtcgctggtgctggcgggggtgttccacgcttcgaacgtgtatgtggtagcgaccttctgcgcgctggcgatgggcttcctggccagcggctttatcaccgcctatgtttacacgcccgagttgtacccgaccagcgtccgcgcgatgggctgcggcctgggcggcgcctggctgaagctggcggcgatcttcgcgcctggcctgatcgccagcaccattggcagcggcaacctcagcgtcgccttcttcgcgctgtccgtggtgccggcgctggcggctgtcaccgtgcatttccttggcatcgagaccaaggggcgggtgctggaagaactggaggtctgaacgggcgtgctggtcccgttcccttcgggccgccccgcaatccgggtgcggcactttttctttattcctgcgtgcgcaacagcttgcgcagcccctggtaaaccgcttcccgctcctccggcgacaactgccggatcacctgcgcctgcccccgccgcgccagcggcatcacctggtcgtgcagcgcggcaccggcttcactgatcgcgcagatcagcttcttgcgcggcgtgttgccggctgaggtcagccgcaccaatccccgatcctccagcagccgcagcgtgcggctcaccagcgccttgtccgaggtcgactgggtcaccagctcggcaaacggcagttcgcgcgcgtgcgccagcagcgccaggatgcgccactccggcacggtcaggccgaactgttccgcatagggcttggtcaccgtgctgcgcagcgcggtgaccagctggctcagcatcgtggtcaggaaattgtcgacggtcaggccgctgccggcctcgtcgaggtcggtccacgggctggtgttgtcggtgtctggcgcgggctggccgttggcgggcgcggcgtcacggggcatgcgttcctcttggtcagggtctgccggccgcggagttcgggccggttggcgggcccgattgtctcacaggcgctcgccaattccgccaccgggtgtcgctttcgtgtcatgcaagagaattaagcaaactaaatcatgtcaataggtatttaacgtaagttgagttgtcaatattggcgacataggattatcaatgttcctggtgtgaacgtacgttttactaataaaacaaccgaaagtgttgtaacccgagccaaccctgttttcgcggtgcgcacaacagcccactccaaccgcgaatgcgcccccacaggagctgttgatgagacacgaacgcccccgccgccttttccttgcagccactgccatggccgcgcttgcgcttgccgcgggcagcgcgctggccaccgccgcgtatccggccaagaccgtgaccatggtcgtggcctatccgcctggcggcgacaccgacgccatggcccggctctatgccgacaagctgtcggcgcgcctgaagcagccggtcatcgtcgagaaccgccccggtgccggcggcgtggtcggcgccagcttcgtcagccgcgcgccggcggacggctacacgctgctgtacacgcccaaccctttcacgctggcgccgatggtgctcaagctggcgccgtcggccagctatgacccgctgcacggcttcacccccgtgatccagaccgcggtgcaggcggtgctgctggtggccaacccgcaggccggcatcaagaccgtcggcgagatgattgccgtggccaggggcggcaagacgctgacctatggcagcccgggcgcgggttcgccgatgcacatcgccggcgagatgctcaaccgcgccgcgggcgtgaagatccagcacgtgccgtacaagggcgtggcgccggcggtcaacgacgtggtggcggggcacgtgaactttgcctacgtcacgctgggtccggtggcgcagtacatcaacaccggccggctgatcccgctggcgatcacggacgcaaagcgctcgccgctgctgcccaacgtgccgacgctggccgagctcggctacaaggacgtggtggtcggcgcctggcatggcgtgatggcgcccaagggcacgccgcccgaggtggtcaaggtgctgaaccagcagctcaacgacgtgctgcgcctgccggacgtgaccgagaagatggccaccttcggcgccagcccggtgggcggcgccccggccgcgctggaaaaggtcaacgcggccgactacgagcggctgggcaaggtgatccgcgacctcgcgatcacggcggaatgacgcagggcagcgcatcgcgttcatgcaaccagacaagcaggaggccggcatgagcaaggccatcgtgggaagctccacgccgcaggtgaccgcgcgggaaaaggtcatggggcgcgcgcagtatgccggcgacatcaagttgcccggcatgctgcatgccaaggtgctgcgcagcccacacccgcatgcgcgcatcgtgcgcatcgacacctccgcggcgaaggcgctgcccggcgtcaagctggtggtgaccgggcacgatgtgcccgcccgcaactggggcccgcaccgcaaggagcagcgcatcctggcctgcggcgtggtgcgccacgtcggcgaggaagtggccgcggtggtggcggtcagcgaggagatcgcgcgtgatgcgctggacctggtccgcatcgagtacgaggcgctgcccgcgctgctgacgccggaagcggcgctggccgatggcgcgcccgagatccatgccggcacgcgcaatatcggccatgagatgcacatcgtgcggggcgacgtggatgccgcgttcgaagcctgcgccgcagtgtatgaggccacctacgacatgcactcgcagtacccgggctaccttgagccgatggcctcggtggcggcgcaggacggcaacgggcggctcacgctgtgggcctcgacccagtccgtgttcctggcgcgcgcgcggctggccgaggcgctggaccggccggtctcgaccatccgcgtggtgcaggcgaccaccggcggcggcttcggcgccaagatcgtcgaggagaacaacagcctgatctgcgccttcctggccagccggctggagcgcccggtgcggctggtcaacaaccggctggaagacttccagggcgcgcgcgccagcgtgccgatgaaagtgtggctgcgcatggggctgtccgcagacggcgtgatcctggccaaggatgtgcgcatcgcggccgaatgcggcgcctactccgggcttgccggtgatgtgatgcacgtcaccgccatgcgcagcgacaacatgcaccgcgtgcagaacgtgcgctcgcatgcggtcatggcctataccaacaacccgccgcgcggcgccttccgcggctttggcgggcagcagatgcagtttccgctgaactgccacctgaccgtgctggccggcatgctcggcatggacccggtggaggtgcacaagcgcaatgcgatcggcgcgggcgagaccagcgtgcatggctggaagatcagcagcaccggcatggccgagtgcctggaaatgacccgcaaggccatcggctgggacgagaagcgcgccgcgccgcgcggcaccggcacgcgccggcgcggcgtgggcattgccgcggccatgcacgtcagcggcaaccgcacgctgggcaactgggacggctcgaccatcctgctcaagatcaacgaggacgggcgcgcgatgctgcagaccagcgagtgcgacatggggcagggcgccaacaccatgctcagccagatctgcgcgcaggagctcggcatcccgctgtcgcacgtgaccgtgatggcgccggataccgataccgcgccgttctgcctgggctcgctggcgtcgcgcgtgaccatcatcgccggcaatgcgttgctgcgtgccgcgcgcgaggcgcgccagaaactgctggcactcgcggcggagaagcttggcgtggacgcggaacaactggcgattgccgatggccgcatcgccgcgccgggccagcccgacaagtccgccacgctggcggagatcgcgcggctgcatatcttccgccacggcggcgagggcatccacgtgcgcgccacctatgacgcgcccacggtgatgcacgacgccgactactacggcaacgtcgcgcccgcgcactccttcgcggcacaggcggtggaagtggaagtcgacaccagcaccggccaggtcaccgtgatcgacagctttgtcgccgacgactgcggcaaggccatcaacccgctcgccgtgcacggccagacccacggcgcgaccgtgcaggcgatcggctggaccctgtacgagaacctgcaatacgaggatggccgcctgatgaacggcaactttgccgactacaccatgccgaccgccgacgcggtgccgatgctgcgcaccgacgtggtggaatcgaacgaccccaacggcccctatggcgccaagggcgccagcgaaaccgcgatcctgccgggcgcggcggcgatcgccaatgccgtcttcgacgccgtgggcgtgcgcatccagtcgctgccgatcacgccggagaaggtgctggcgggcctgcgcgaactgaagcagaaggaggccgtccatgcgtgactttgccttccttgagccggccaccgtggccgaggccagccagatgctggccgagctgggcgacagttgccgcatccttgccggcggcaccgcgctgatgctcggcatgcgccagcgcatgctgacgcctggccacctggtctcgctgggccggctcaaggcgctgcgcggcatcaccttcgatgcgcgcgagggcctgcgcatcggcgcgctgacgctgcatgccgaggtagcgcgctcgccgctggtgcaggcgcactacccgatgctggccagcatggcctcgcgcgtggccaatccgcaggtgcgcaaccagggcaccatcggcggcaacctctgctatgccgaccccgccaccgatccgcccggctgcctgatggcgctgggcgcgcggatcgtggtcagcggccgaggcggcgagcgcgagatcgatatcgaggacttcctggtcgactactacgtcacggcactggcgccggacgagatcgtcacgcagatccgcgtgccggcgccgggtgccggcgccgatggccgctatgcgcgtttcctgcgcaccgccgccgagcaccggccgctcgccagcgtggcactggcggtgcggcgcgagggcgcgttctgcgtcgaggcgcggctggcggtgggcgcgtccacgccgatcccggcccggctgcgccgcgccgaagcgctgctggccggcaaggccgtcaccgcggaactagccgaggagacggccgccattgtcgccgcggacatcaacgcggtctcggacatgcgcgggtccgaaagctaccggcgcgagatggtgcgggtagtcgcgcgccgcaccattgccgagctgttcggcgtggcatcggagtaaggaatccccatgaaccaagtcagcatcgaactcaccgtcaacggcgaggaacaccaggtggaggtgccggcgcggcgcctgctgtccgacctgctgcgcgacgacctgaacctgaccggcaccaagcgtggctgcgagaccggcatctgcggcgcctgctccgtgctggtcgacggcgaggtggtcaagtcctgcctgatgctcgccgtgcaggcgcgcgggcgccatgtgatgacggtggaggggctggccgccgacggccagctgcatccgctgcagcagtgcttcatggacaacggcgggctgcagtgcggctattgcacgccgggcttcctgatggcctcgtgcgcgctgcttgccaataaccccaacccgaccgaagacgaagtccggcacggcctgaacggcaacctgtgccgctgcaccggctatgtcggcatcgttgaatcggtcctgtccgccgcggagaaaatgcgtggaaattgaaaagaccctggtcaccgcggcgccgccggcgcgcgtgtgggagctgctgctcgaccccaacgtgatgggcgcgtgcgtgcccggcatggaatcgatcgaagtgctgagcgatgtcgagtacatcgcccatatggcggtcaagatcgccttcatcaacgcgcgcttccggctgcatacgaagatcgtcgagacgcgcgcgccgcattacctgcgcaccgagggcaccggcgaggacgactcggtggccagctcgctgcgccagtcgagcgagctcttcctgaccgccctggacgatggcggcacgcagctgcgcatcagggtggaggtggacgtgctgggccggctgggcactttcggcctgagcgtgatgaagaccaaggccgaccgcatgtgggacgagtttggcgccaacctgctggcgcggctgtcgccgcagggggcgcaggcagcgcccgagccggcggcgaagtccgcacctgcggcaccggttgcatcggccgcggctgccaacggccatgcggtgctgccgacacggtccgcgcccgcacccgccgccggcgggctgttctcgcggctgttcgggcgcggcgaggccgcgcgcgggccgctgtcggacatctgcgttgagcttcgccgcagcgacgagaccatcgtggtgcggtggcccgccgcccagggcgagcaatgcgcggcctggctgcgcgactacctgcgcccaggggcataggcggagccagggcggggtctgccggcaatacgggtaccctacggggtgcaggcgtgatatatgagagcgttacgccaagaccgaatattgcagagacagaccatgacgaccgattcgccgcaggaagacacgcaggaaagcggccaggagggcgccccggagagcgcccaggagaagtacatcgtgccggggctggagcgcggcctgcggctgctggccgaattcagcagccgtgagcgcaccttgtcggcggccgagctggcgcgccggctcaaggtgccgcgttcgaccgtgttccggctgctggccacgctggaaatgatgggctttgtcgagcgcaccgacggcgggcgcgaattccgcctgggcatggcggtgctgcggctgggctttgactacctggcctcgctggagctgaccgagctgggccgcccgctgctggaccggctgcgcgacgagatccactatccgtgcaacctggtggtgcgcgacgggcgctccatcgtctatgtggccaagtcggtggcctcgcgcccgtttgccagcaccgtcaacgttggcacccggctgccggcgcatgcgaccgtgctgggccgcgtgctgctggaagacctgtcgctggcggaactgcgcacgctgtatccggaagagcgcctggaggtgtattccgaaagcacgccgcgcactgtcgaagagctgtacgacatggtccagcgcgaccgccagcgcggctatgtgctgcatgaagggttcttcgaggccagcatctccaccatcgcggcgccggtgcgcgaccgcagcggcaaggttgtggcggcgctgggcgcgaccatcccggcctcgcgcatcgatccggaccagctcgacaatgtggtggaacaggtcaggcgggcggcggccgagctgtcgagcctgctcgactaccggccggaggtgccgaaaccgttcgcgtgacggcagcgcgcgccgccagccatccattgggaagcaatatgcagcaacgcaagacatacaacaggccgccgcgccggcggcaatggctggccggcacggcgctggccgctgcgctggcggcgtgcgtgccgtggcaggcggcgcaagccgccggctgcgccaatgtgcgcatcgtggtgccgttcccggccggcggcccggcagaccagctcgcgcgcacgctggcgcacgggctgcagcagcggcgcggcacgccgttcgtggtagacaacaagcctggcgccaacggcaatatcggcatcgacacggtgcggcgcgcgccgggcgacggctgcacgctgctggtggccccggccggcaacctgaccatcaaccccacgctgatgccggcgctgagctacaacgtcgagcgtgatttccggccggtgtcgctgctggcgggctcgcccaacgtgctggcggtgcatccgtcagtaaaggcgaattccgtgcaggacctggtcaggctggcacagcaggcagagaagtccggcaagccgctgggctacgccagcccgggcgtcggcagcggcctgcacctggccggcgagctgttccgcaacaaggccggcatcacgctgctgcacgtgccctacaaaggcaccacgcaggcgctcaacgacgtggtgggcggacaggtgccgatgctgttcggcacgtggccgacgctggcgccgtttatccagtccggcgcgctgcgcgcgctggcggtgacgcagtccaggcgctcgccggccgcgccgaacgtgccgtcgctggccgagcagggcgtgcccggcatcgacgtcagttcctggtatgcgctgctggtgcccagggccacgccgcagctggcggccgatgcgctcagcgccgacgtgcgcgcgctgctggccacgcccccggtgcgggccgagctgcagcgccagggcatggagccggtgggcagcacggcgcaggcgctcgaggcccgcatccgcgaggaaaccgcggcgtgggcgaagctgatcaaggcgtacgggattaccgcggagtagcggcgctgcggtatcccatcaggcccgacaggtcgcgcgcggcctgcctgacttccttctccacgcgctcgcgcagcgcgccatcggcttcaaagcgctgctgcggtcccgccacgctgatcgcggcgatcacgtcgccgtcggcgccgcgcaccggtgccgcgcaggaatcgatgcccggttcataggcggaaaagctccaggcgcagccgcgttcgcgatcggcggcaaggatatcagccagccgcgcgtgcgtggccgggctctggccggtgaccgtcggcaggggatcggatcccagcagctcgcgcagcgtctccggcggcagctcggcaatcagcatccgccccggcgtggtcaggtgtgcggccacgcggctgccgacctggatattgctgaccagcgaggccgcgggcatctgccgcagcaggtagagtgcatcgccgccatcgcgcacggccaggtaggccgacagctgcagcgatgcgctcagccgggccagcacgcgtgcggcaaagctggtcaggtcattgctggccagcacgcgcgaggccagcttcaggaagttgaagccgacctggtgcccgccttgcggcaggcgttccaccatgccctcatgctccagtgtatccagcagccgcatcacggtgacgcggttcacgtcgatgcgccggcccacttcgctcaggttggcggtggcgccgccctcggcgatgaagcgcagcaggcgcaggccgcggatcaccggcgagaccagctgggcttcgcgggcgtcttcggtatcgccatcgtcggcaaggtcaggctgtgggcgggatttgggcatggtggtgtctgctgtcaacggaaaacggccgcgcaggcggccgtgctggcggaaacgatcggcgcggcttcagccgagggcgacgttccaggcgtcgtaatcgtacacccagtcggcattgccgccttccttcagccaggcattgccgcgcgagccgatctggatgcggctggtgcgttcgtggcgcgcggcctggtagcgtgccagcgcggcgggcacgcctgcggcaccgccgggtgcggcatcggcaaggcagcgcgccagcaccacgccgtcttcaatcgccatgccggcgccttgtgccatgaacggcatcatcgggtggcaggcgtcgcccatcagcgtgaccgggccggcgcaccatgccggcagcgggtcgcgcacgtacagcgcggagatcagcacctcgtcgcaggcatcgagcagtgcgcgcgcctcggggtggaagccggcataggcgctgcgcaggtcttgcacgcggcccggcgtggtccaggactcatggcgccaggcttcctgtgcgacggtggcgaagataaagatgtcgcggccgcggttgagcgggaaggtgacgatctgtgtggcggcgtcggggccccaccatttggtgaaggcgcccaggttgggcacgccggcgaggcgctcggcgggaacgaccgcgcggtaggccaccacgccggtgaagatcgggctttcctggccgaacagggcggtgcgcacggtcgagtggatgccgtcggcgccgaccagcacatcgacgcgctcctctgcgccactggcgaagcgcagcgtggcgctatcggcatgcggctcgatcgccacggccttgtggccaaggcgcacgcattcggccggcacggcggcttccagtgcggtcatcaggtcggcgcggtgcatggtcagttgcggggcgccgtagcggcgctcggcgtctttctgcatcggcaggcgggaagtttcttcgccggtgtcccacgtgcggctgatgcggtggctggggcgtgcggcggtttcgcgcagggcgtcgccgatgcctagcccgtcgaggacgcgcacggcgttgggggtcaggttgatgtcggcgcctacgcgggcgaagcggggggcttgttcgtagacgattgcgtccatgccgagcttgcgcagtgcgatggctgcggcgaggccgccgatgccggcgccgttgattccgatcttgaggggcatttagtctacctgcttggttgtgttcaaaaatgaactatatgttcataaaaatatatgagcgcaggtgtagccagtcaattaagggtgaaccctagggagtggttttcagtcctttggtggggatggagttggggcaatgcggtcggtttgtggcttctggcagcgtggctgtttcgccggcgtggccggcgagtcactttttgtccgagcgacaaaaagtaaccaaaaaacgcgtcgcctatgcggctggcaatcaattccgcggcgttggtggttcgagcggtggtgcttgccgtttgggcgtgggtgcccgttcgaccctgctacgccatgtgagtgtggggcagtgcctgcgttaacccactattggacgatccccatgcagggtgtaggccgcctgctgccgaccgtatcgcggggacgcctacggctgctgcgcaggctcaaagtgcgctgtcggttttttctgcgtttgcgcggggcgcagccgaaggcgttgatgcgatatcgccaagtcccaaaaaagcagccgcacacggcggctgcttttgaaaccatggctggaacagaaccgttcaaagccccaacacaagcttggcaatgatattgcgctggatctcgttagaccccccgtagatcgacgccttgcgatagttgaaataacgcggcgccagcacggctgcataatccggcccgacacgcggcgcggcctcgcgcccttgcaacgcagcccacgtatcctgcacgaacggcaacgccgccggccccgcggcttccaccgcgagttcgcttgctgcctgcagggtttcagtgcccgtgagcttcagcatgctcgacgcggccccgatcgaggtcccggattccacgcctgagaacacccgcaactcaaccgcttccagcgcggcagcacgcaggtgcagcgccgccagcttgcggcggaaggcgggatcgtccagcaggcgggcaccgtcgtcggcaggctgctccgcggcaatctccgcgatcttcgacagttgcttgcgcagcatcgggctatatgtaccgccgcgctcgaactccagcaggtacttggcataggtccagcccttgccttcctccccgatgcggtttgccaccggcacgcgcacgttctcgaagaagacctggttcacttcctgctggccggtcatgggaccgtccagcgtcggcagcgccgacaccgtgatgccgggcgtatgcatgtcgagcagcaggaacgaaatcccttcctggcgcttcgattcgcggctggtgcgcaccaggcagaacatccagtcggcccactgcgcatgcgtggtccagatcttggagccattcaggatgtagtgctcgccgtcgctgtcggtgccgtggtcggcgcgcatctgcagcgaggccaggtcggagccggagttgggttcggaatagccctggcaccaccacacgtccgagctcaggatcggcggcaggaagcgctgcttctgctcgggcgtgccgtacttcatgatcaccggcgccaccatcttcaggcccattggcgacactggcgggcagccggcggcggccagttccgactggaagataaagcgctcggtcggggtccagcccggcccgccgtattccttgggccagttcggcgcggcccagccgcgcgcgtgcagcgccttctgccagcgcagctgcgcggccttgtcgaggtagccgttcttggactgcgccatcatcgcgcgcaggtcggcgtcataggcctgggcgatccaggcgcgcacgtcttcacggaactgctgatcttgcggggagaaatcgagattcatcgacgggcctcgctgggtaatcgtctgggttcggggatgccggcttcaggccgcggccagggcggggtagagcaggtcggcgtagcggcgcaggtggtgctcggccgagcccagctgcaggtcgatcgcggtgacgcgcttgaagtagtggcccacggccagctcttcggtgacgcccatgccgccgtggatctgcaccgccgcctggccgacaaaggcaccggcctggccggcctggatcttggccgcgcacgccgcctgggcgcgtgcctgcggcgcgctggcagcctgcatcgccgccacctgggtcagcgccacggattgctccagctgcacgtacatgtcggccatgcggtgctgcagcacctggaaggtgccgatcggcacgccgaactgcttgcgctggcgcgcatagtcgatggtgtcggccagcatgcgcgccatcgcgccattggcttcggcacagagcgcgaccatggcttcgtcgcacagctgttcgatcagggcaaaggcttcgccttccgcgccgatgcgctggctcgccggcacctgcacgttgtcgagcagcacctcggcagcacgcaggccgtcgaaggtcgggtactcgcgcagcgtcacgcccggcgtgtcgcgcgcaatccagaacaggctgatgccgtcccggtcgcggcgcgcgccggaggtgcgggcgctgaccaccaggtgggtggcgaacggcgcgccgaccacggcgtgcttgtgcccgctcagcttgtagccgttgccctggcgcgtggcgccggcctgcacgtcgtggcggcagtagcggctggcgggttcggcgtgggcccaggcggcggtggcttcgccgccgatgatggccggcacccactgcgcggccagctcggggctgccgtgcatcagcgcgcccccgcccagcaccacggtgcccaggtagggctccagcgccaggtggcggcccagttgttccatcacgatcatgtgctcggccgcgccgccgcccaggccaccgagcgcctcggggtaggccgcgccgagaatgccgagctcgcgggcgaatgcgcgccagcagtccgggcgccagcccgcggcggactgcacggcagcgcggcgggcttcgaaatcatagtggtcggccaggtaacgcgcgagcgtgtcgcgcagcatcgactgttcttcgctgaactggaaatccaccttggctccttcggaatgggggtgaggcgtgattgcagtagtctggcgggcatcatcctgccaggccgcccggtggcgcatcgtcgcatcggacgaagctgttccggcgcgaacgcagcccttttttgtggcactgcggcaaaacggtggcggtgccgcttcgtcgcttccgacgatggttgaaccggctggggttccgagaatgcggtaccggcatccgccaacacaccgacaccctcgaggagtccaacgccatgcatccgcacatccacgcgcagcgcacacccgaaaaaccagccgtcatcatgggtggcagcggcgcagtcgtcacctaccgcgaactggacgaacgctcgaaccaggtcgcccacctgttccgcagccagggactgcagcccggtgaccgcgtggcgttcatggtcgagaatcatccgcgcctgttcgaactgtgctggggcgcgcagcgcagcggcattgtctatgtctgcctgagcacgcggctgaacgtggccgatgccgcccacatcatcaatgacagcggcgccaggctgctggtcaccacgcacgcgcaggccgaggtcgcggcagccctggccgggcagacgccggccttgcgcggcaggctgatgctggacggcacaatgccgggctatgacgcgtacgagaccgcgctggcgcgctgcccggcaacgcgcatcgatgacgaagtgaccggcggcgacatgctgtattcgtccggcaccacgggccggcccaagggagtgtatgcgccgccatcaagcccgaatatcgacgatcccacgaccctgaccagcctgtgccagcggctctatggcttcgatgccgagacgcgctacctgtcgcccgcgccgctgtaccacgcggcgccgctgcgctacaacatgaccgtgcaggcgctgggcgggaccgcggtggtgatggagcatttcgatgccgagcactatctgcagctggtgcagcagcaccgcatcacgcatacgcagctggtaccgacgatgttctcgcgcatgctcaagctgcccgaggcgcagcgccaggcctatgatgtgtcgtcgctgcgcgtggcgatccacgcggccgcgccgtgcccggtgcaggtcaaggaagccatgatcgcgtggtgggggccggtgatctgggagtactacgccgggacggagggcaacggcgtgaccgtggtcagcacgccggagtggctggagcgcaagggcacggtgggccgggccatggtcggcaagctgcgcatctgcgggccggacggcgcgctgctgccgccgggcgaatcgggcacgatctactttgccgaaggccgcgacttttcgtaccacaacgacgaggccaagaccgcggagtcgcgccacccgcagcagccggactggagcaccatcggcgatgtcggctacgtggatgcggacggctacctgtacctgaccgaccgcaaggccaacatgatcatctccggcggcgtcaacatctacccgcaggaggccgagaacctgctgatgacgcatcccaaggtgatggacgtggccgtgatcggcgtgcccaacgaggacttcggcgaagaggtcaaggccgtggtgcagcccgtcgacatgagccaggccggtcccgagctggccgcggaactgatcgcgttctgccgcgccaacctgtcggccatcaagtgcccgcgctcggtcgacttcgcgtccgagctgccgcgcctgccgaccggtaagctgctcaagcggctgctgcgcgaccgctactggggcggccacgccaacaagctggtgtagggccgtctgccgctgcccgcattttcgcgagtgcggcggtttacgtcataatcctccgttacatcacagccacggcccgcctgcctgcatccgcagcgcgggcgggcgcatcgcgcggcctgcaacggcagcgatgtgcgggagacgacaacagccaatggcaagtatcgaggagaccggacggcgcgcgccgccgcccgccggcgccgcatcgctggcggccaaactgcgtccgccgctgctgaccccgttccaggtcgagcgcgcggcgatctgcgagaccgtgtgcgcggccggtttcgtcaagcttgtgctggtgcgtgcaccggcgggcttcggcaagaccacggccatgctccagtgtcgcgcgcgcctggaggccgcgggcgggcgcaccgcctggctgacgctggatcggtcggacaatgatgcctcgcgctttctggggtcggtcgaagctgccatcgcgcagggcctgggcggcggcggccccggccggtccgcgcacgcgacgctggcacaggatcccggcgagcaggcgctcgcgctgatcgaccgcctggccagccataacggcgccttcacgctgttcctcgatgatttcgaagcgatccagaacgccgccgtgaccgggctggtctggcaactggtggaaagcctgccgcccggctgccgcgtggtgatcggcacgcgctgggttccggaatccggcctgggccgcctgcgcgcgcgcggcgagctgcttgagatcgaacccgcgcagctgcgtttttccgccagcgaaactgcatccttcctgcgccgtgcgcgcgggctgaagctggagcaggcggccatcagcgtgctgcaccggcgtaccgagggctgggccacggcattgtggctggcgtcagtcgcgctggagcggcgcagccagccagagggttttatcgccggcttctccggctccaacgcggcgattgccgactacctggtcgaagacgtattcctgcacctgcccgaggcggtgcgcgacttcctgctgcgcacctcgatcctggaccagttgtgcggaccgctgtgcgacgccgtgtgcaagcccgcgacagctggcagcagcgacgagatcctggcctggctggagcgcgccaacctgttcctgctgccgctggagagcgaacgctatggcgagcgtggctccggtgcggcatcggagcagtggtaccgctatcacagcctcttttccggcttcctgcgcggccagctggcgcaggccatgcctgacgccgtgccgcagctgcacctgtcggcatcgcgctggtatgagtcgcaggggcgcccggtgcccgccatcgagcatgccttcgcggccggtgcgctggcgcgcgcgctgccgttgctggacggcgccgcggacgacctgctggcgcagggccgcatgcgcctgctgacgcgctggctggaggcggtgccggcggaagaactggcgcgctggcccaagctgcagatcgcgcgcgtgtgggcggtgtcgttcacgcgcggcccggccgaagccatcgccctgctgcagcagatccccaccgagggcgcggccggcgacctgctggcgcatatccgcgcgctgcgccacatgctgctgaacatgatggaccgcttcgacgatgcgcgcgccttcgcccgcaatgagctgccgccgttgccgatgggctatgccttccccgatgcgatcctgggcacgtcgatggcacgcctggctgcggtcgccggcgactacccggaggcgcgccggctgctgcaggtggcacggcacgcggtgcgaggctcggacagcaatttcaacaagattttctcggaatcggtcgaagggctgatcgacctgcgccaggggcggctgcagcaggcgctggcgcggtttcgcatcgccgccagcacgatgctgccgaaccgcttcgggcccaccaacggcaatgccatggccggcatcctgctggccgaaggcctgtacgagagcggtgattccgagcgcgccagccgattgctcaacgtctacctgccgctgtcgcgcgacctcgggctgcctgaccagatcatcaccgggcacacggtgctggcccgcattgccttcgagcgcggcgaagccgaccaggcgcatgaatggctggcgcaactggaagcgctggggcaccaccgcgggctgacgcggctggtgatggcggcaatgctggagcgcgcacggctggcactgcgccagggcaatgttcacgcggcgcaggaggcgatcgaacgcgccgccgatccggcgctgtggcgcacgcggcccggggtcagctcctttgccagcgatgtcgaggacatcacccttggccggctgcggctggacctgtatgcgcgcccgggcacgccggtgcgcgaggtcatcgagcgcgagctggcggctgccgccggcaaccagctgatgcgccgcgcgctcaagctgcgcatcctgctggcgcaggcgtgccagcgcaccggcgacggcgcgcacgcgctggtggtgatgggcgaggcgctgcgtttcggcgctgccgaaggctttgtccgcatctttgccgacgagggcgacgatgtgcgcaggctggtggccgatgcctgctcgcgccagtcggccagcctgcctgccccctatgtggaaaggctgctgcaggcctgcggccaggccgggagcgagcaggccgccggtaccggccggccggcgccggcggcgctggtggagccgctgacgcccaaggagcagaaggtgctgcaactgctggccgagggctattccaatgtggccatggccgagcgcctgttcgtgtccgaaaccacggtgcgcacgcacctgcgcaatatcagcgccaagctgcacgccagcaaccgcacccaggcggtggccattgcacgccagctcgggctgctctgaggccgcgcgcgcaggtcagcccgcgcgcgcttgcggctcagatgcccatgaactccgtgaattcctccagcggtgcgcgcacggaacgcagctggttggcgggcgcctcggggtcttcgtagccgatcgccatgccggtgaacagcatccgttcggccggcagcaacaggaacttgccgagggtctgcgggtacatcgcccagcattcctgcgcgcagctgtccagcccttcttcacgcagcagcagcatcaccgtctgcaggtacatgcccaggtccgaccattgcggcgggcccatgcggcggtccacggtgcagaacagcgccagcggcgcgccgaagaaggtgaagttgttggcaaactgcgccagccgccgcgccttgtcctcgcgcgggatgccgaggtagtggtagagcgcctcgcccacctggaagcggcggtcgcggtagggcgagaccagctcgcgcgggtagatgtcgtactcgcgctcttcacccgcgggcgcctgggcgatgcgcttgcgcatgatggcgcgcagcccctccagggcctcgccgccgatgacatggatatgccagggctgcaggttgccccccgagggggcgcgcgcggcggcgtcgagcacgcggcggatggtgtcgggcgcaacggcccggggcaggaagccgcggacggacttgcgactggcgacggcttggctgactttcatgcgaattccggaaaagttgatcgacgggcgcgcttcagatgaagggcggctcgctggtccagtcgaagaagtccggcatgtcgtgcgacacggtttccgggaaggcggcgggacgcttctccaggaaggcgctgacgccttccttgacgtcggcggagcgcccgcgcgactggatcgcgcggctgtcgagcttgtgcgcttccatcgggtggctggcgccggccatgcgccagatcagctggcgcgagatcgctaccgaaaccggcgcggcattggcggcgatctcgcgggcaatggcctgggcggcaggcagcaggtcttccggcgcgtgcagcgagcgcaccaggccgcgctcatgcgcttcctgggccgagaacacgcggccggtatagcaccattccagcgcggtcgagatgccgaccacgcgcgacaggaaccacgacgacgccgcttcgggcgtgatgccccggcgcgcaaagacaaagccgaacttggcgtcggtcgacgccagccggatatccatcggcagctgcatggtcacgcccacgccgaccgcggcgccgttgaccgcggcgatcaccggcttgaggctgcggaagatgcgcagcgacacgcgcccgccaccgtcgcggtgcgcgctgtcggggctggcgccataacgcttctcgaagtcgaaggtggagctgccgccggacaggtcggcgccggcgcagaaggcgcggcccgagcccgtgacgatcacggcacgcacgttgtcgtcggcatcggtggcgtcgaacgcggcgatcagttcatgcatcatctgcgcggtgaacgcattgagctggtccgggcggtgcagggtgatggtggcgacaccgtctgcaacggcgtagcgcagggtttcgaacgaaggcgtggcttgcgtcatggggggctcctgccgggattgctgcgaatatgggaggaagtgtgccggggcggggcgccggcacggggctcggtcaacactagtgcagaatgcgccgcccgcaatcgtcgcttccgacgaggctcggaatcggcacctggccgtagactgaccccgatcaagcggcagggccggcactaccgcgcgcctgccggcgcagacagcaaagggacaaccatgaagacacgaatcaccgaactgcttggcatccgctacccgattatccagggtggcatgcaatgggttggctacgccgagatggcctccgcggtttccaacgccggcgggctgggcatcctcacggcgctgacgcaacccacgcccgaggcgctggccgaagagatccgccgctgccgcgagatgaccgacaagccgttcggcgtgaacctgaccctgctgccgtcgatcaacccgccgccgtacgcgcgctacctcgacgtcatcatcgaaagcggcatcaaggtgctggaaaccgccggcaacaaccccaaggaacatatcgcgcgcgccaaggccgccggcatcaaggtgatccacaagtgcgtggcggtgcgccatgcgctgtcggccgagcgcctgggcgtggacgcggtgtcgatcgacggcttcgagtgcgccggccaccccggcgaggacgacgtgcccggcatggtgctgatcccgcaggcggtgcgcaagctgtcgatcccggtgatcgcctccggcggcatcgccgacggacgcggcatggcggcggcactggtgctgggcgccgagggcgtcaacatgggcacgcgcttctgcgccacgcgcgaggcgccgatccacgacaacgtcaagaaggcgctggtgcaggccagcgagcgcgataccaacctgatcttccgcacgctgcacaacaccgcgcgcgtgctcaagaacgccgtgtcggacgaggtggtgagcattgaacgccgcccgggcggcgcgcagttcgaggacgtcaagcacctagtcgccggcgtgcgcggcaaggcggcgctcaaggcgggcgagaccgacagtggcatcatcagcgccggccagtgcgtgggcctgatcgacgacgtgcccagctgcgaagaactgatcacgcgcatggtggccgattgccgagagcacctcagcgtggcttcgcgcttctttgcctgacgccatggccgaggctgaaatcgagcgggcgatgacccaggccatcgccgcgccgggcgaagctgccggcggggacgtgccggagggcttcgtcccgctgcgcagcatgagcggctacatggcaggtttcggccagctctacctgcatgcggagcgccgcacgctggcggtgcgcatcgacgagagtcacctgaataacctgggcatcccgcacggcggcatgctggcgacgctggccgataccgccatcggcatgatgatgtcgctggaaaccgggcgctccaaaagcgcggtgaccgtcaacctgagcctggactacctggattccgcgcgcctgggcgactgggtcgaggcccgcgtggagttcgacaagctcggctcgcgcctgcgctatggcacctgccggctggtcagtggcgagcgctgcctgctgcgcgcgaccgcaatctttgcagtgctggcgccgcgcacctgaggcctgcggcaaacttcgtcgcttccgacgacgcttgccaccacccgcggcgcaacaatgcaaagcgacactgccggcgccagatgccggcactccggacaacaccatggctgccccggcagcctgcaccgaaccaaggagatcacatggcagaggcatatatcgtcgcggcggtccgtaccgccggcggccgcaagggcggcaagctgtcgggctggcatccggccgacctggccgcacaggtgctggacgcactggtggaacgcaccggcgccgacccggcgctggtcgaagacgtcatcatgggctgcgtgagccaggtcggcgagcaggccggcaacgtggcgcgcaatgccatcctggcctcgcgcctgcctgaaagcgtgcccggcacctcggtggaccgccagtgcggttcgtcgcagcaggcactgcactttgccgcgcaggcagtgatgtcgggcgcgatggacatcgtcatcgccgccggcgtggaaagcatgacgcgcgtgccgatgggcctgtcgtcgcagctgccggccaagaacggtttcggtgtgcccaagagccccggcatcgaggcgcgctatcccggcgtgcagttcagccagttcaccggcgccgaaatgattgcgcgcaagtacgacctgtcgcgcgagcagctggatgcctacgccctgcagagccaccagcgcgccatcgccgccaccaagtcgggccgcttcaccgccgaaatcctgccggtggaagtgcgcacggccgacggtgccaacggtgaaatgcacaccactgacgaaggcgtccgctatgacgccacgctggaaagcatcggcagcgtcaagctgatcgccgaaggcggccgcgtgactgccgcttccgccagccagatctgcgacggcgccgccggcctgatggtggtcaacgaggccggactgaagaagcttggcgtcaagccgctggcgcgcgtgcacgccatgacggtgatcggccatgatccggtcgtgatgctggaagcgccgctgccggccacggaagtcgcgctgaagaaggcgggcctgcgcatcggcgatatcgacctgttcgaagtcaacgaagccttcgccccggtgccgctggcctggctgaaggccaccggcgccgatccggcgcgcctgaacgtgcatggcggcgcgatcgcgctgggccatccgctgggcggctcgggcgccaagctgatgaccacgctggtacatgcgctgcatacgcacggcaagcgctacggcctgcagacgatgtgcgaaggcggcgggctggccaacgtgaccatcgtcgagcgcctgtaaagctgtgagagtcgccgcgtgccgcacaggcacgcagcgcatggatcgccgcagcaaggagtagtaaagggagaaggaccggcggcgcgggcatgtcagagtgcccgcgccagcagccggaaaagggggccgcgattttcgcggcttttcttgtttgcggtgtgtcgcgcgcgtcaggcgaacgtcactgcgctgcgccggtcggcgcgttccaggtgcggcacgttgttgaagctcagcagccgctgcacgccgcggccgacgatgatctcgcagaacgccgtattgcggaattgcaggttcatctcgatggcggcctgtgcaggtgcgccaagcaggtcggccgtggcgcggccgatggcgccaccggagctcaccaccaggatggcatcctcgcgcgtcatgccttcgcttgcgtgcgccagggcgccggtaatgcgggcgccgaaatcggcccagctctcgggcatctcggccagcccgtcctgggtccatgcggcgtaggccgcgcggaaggtgcgccagtagtcgttgtagtcgccgttctggtgcgcgcggtggtcggcgccgccggtgtggcaacggtacagcgcctcgccgtcgtattcgttcaggcccgcgtgcgagacgatcgctgtctgcggctgacccatgccggccaggatctcgctggcggtgtcctgctggcgcaccagcgtgccggacaccacgcggctgaagctgacgccgcgctcctggaaatactcgcccagccagcgcgcctgctggcggccggtcggcgacaggcaatcgtagttggcggcgccaaacgaggcttgtccgtgccggacgaggaaaagcgtggccatgagcggtcccggtaaacgtgaggcggatagggctgcgcccggcgcgtcgttttgcggcaggccgggggcgccgggcacggcgcccggcgtgggcacattctagggaggtccggcgcgccagccaagcaagcgctgcgcaattcatggcagccatggcctggctgcattaccgcgggtggcgcgggccggtggtgtgctcaggccggctctgcgcaggggacgccgagatagccggccatcaggcggttgagttccgggatcatctgttcgtcgtcgaggtgcagtgggccggaatcattgagcacggcattgaccagcacgctgaacaccgcctgcatggcaaagcgcacgcgcacctcggcggtgtcggcaggcatcgccagccgcggcaccagcaactgcaccatgcgctccacgatggcttcgccgctctggcggtggggcacccattcctcgggccgcgtggacgcatgccgcagcgatgcccggatcacgccgcggttggccagcgtgccgagcaccatgaagcgcgtggccttttccagcagcaccggtgtcggcacgtcctcccagcgctcctgcgccaggtagcgctcagtcgacgcggcggtttcttccatgaccagcgcacgcaaggcctcgaaataggccatcttgtcgcggaagcgcccatagaaggcacccaccgatacctggcatgccgcggcgatctgggccacggaaacggcggcaaagtcacgcgaggcaagcagttcgcggcccgcgcccagcaaggcctgttcggtctcgcgcgcacggcgctggcgcggcggctgcaggatcgagggggtatcgatacggggaaaggaggcgttggcggtgaagccggattgggtcgctgacattggcactccgtattcgaattctgattcgaatttgaaaataccggtgcgtgccgcgacgcgtcaaggattttgtcgggtggcagcccggcgtggcgggtgggtgggctgcgccggaggtggcgttgcggcgcgcatgtgccgcttgcctcggcgcgggtcagagcgatccgaacacggtgcccagtccgtaggtgaaggctgccgccatgcccccgatcagcacctgccgcagcgccgagaaccatcccgggcggccattgaacgacgaggtgccccagccaaccaggccaaggccggccaggcacgcgacgatgctgccgaactgcgccgatggccctgcggtcacgaggaacggcagcaacggcaccagcgcaccgctgctgtacagcacgaaggaaattaccgccgcctgcaccgggttgccgccgcgctcctgcgggttgatgcccagcacttcgcgcgcaaaggtgtccagggccgcgcgcgggttgcgcatgatctcgtcggcggcacgctcggcatcggccggcagcacgcccttgcccacaatcaccgtgaccagccgctgtcgggcccggatggcatcatgcgcgagctcgtgcgccatgtcgcgcaggcgcttgttgttcatctcgcgactgttggtcaccgacagccattcgcccagcgccatcgagcaagcgcccgccgccaggcccgccagcccggccaggatgacggcctcgcgcgaggccgccgcgccctccaggcccatcaccaggcagaagctggacaccagcccgtcgttgacgcccagcacggctgcgcgcaaggcgttgccgctcggtcgatggagcaggcgccgtacgcgggtgccgaagccggttggagtgggggcgctcgacaggggcatggtccttttgcgatggagcgttgtcagttgaagcgcgggcccaggtcatcccgcatccattcgataaaggcgcgcgtgcgtgccggcaacagtcgcgcatggggatagatcagcgatagcggccatgccggttgctcgaaagcctccagcacgatgcgcagtttgcgtgcttcgaccagttgcgcgacctgataggacaggaagtggccgaagcccgcgccttcggcacaggcagccacggcgggcgcggtctggttgaattccaggttgccgctgacctgcacgtggaactcccggccgtcctcctggaaggtccaccagtgcgcgtggttgccggtgaagcgcacgcagttggcgctggccagttcctcgggatggcgtggcacgccgtgcttgcgcaggtaggcgggcgtggccaccaccacgcggcggatgctgccgacggtctgcgccaccagcgtggaatcagccagcgggccgatgcgcacccccacgtccaggtcttcttcaagcaggttcaccacgcggtcggtgaattccatgcggcagcgcacgcgcggatagcgctgcacgaaacgcgtgaccgccggcgccacatacatctggccgaacagcaccgaggcggtcagcgtgagctggccgctgggttcgacatggctggcggtcaggccggcctcgacctcgtcgatggtggccaggatgcgccggcagctgtccaggtagctgcgcccctcgccggtcagcgacagccgccgcgtggtgcggttgagcagccggacctgcaactcgaattccagcgccgccagcgtgcgcaccaccgccggcaacgaggtatgcagcgtcgtggcggctgccgtcaggctgccctcgtcgacgatccgcacaaaggtctgcatcgcgcgtagcttgtccatggcgccacacattactccattctttggagtagtcaaatatcaattgccctatttattgcaacgacttcggcgcccagaatccggctatcccaaccgttgaggagagtgccatgcaagaaaccaatcgccccgccaagccgctggtgctgtaccgctcgccggtgtccggccacgcccatcgcgcagaactgttcctggggctgctgggcttgccctgccggctggtggacgtcgacctgcgcggcggcgagcagcgcagcgaggccttcctgcgcctgaacccgttcggccaggtgccggtgctggatgacgacggcgtggtcgtcggcgattccaacgccatcctggtctacctggccacgcgctatgacgacggccgctggctgccgcgcgatccggtgggcgcggcgcgcgtgcagcgctggctgtcggtggccgccggcgacattgccttcgggccggcggcggcgcgcctgggcgtgctgttcggcaggccggtggcgatggacgatgccatcgcccgcgcgcagcggctgttcacgctgatggaaatcctgctcgccgggcagccgttcctggcggccgaccatgccaccattgctgacgttgccgcctacagctatatcgcccgcgccgaggaaggcaacgtgccgctggcgccgtaccccgcgctgaacgactggctgcgccgcatcgaagccttgcccggcttcgtgccgatgctggtgtcgaaggtcggcctggcggcgtagcgcctgccggacccgcgtatcgccaatcgatccgacaaggaaaaggagctagtcatggatctgcccacatggccgcacgccggcctgccattccacgccggcgaactggccgcccaggagcgcgccggcaagcgcgaacgcatggccgcgtccggcccgcgggtaatccgtggcgagatgccggagcagcaccgcacgttctttgcgcagctgccgttcctgctggttggcgccgtcgatgccgacgggcagccctgggccacgatgctggccgggacgccggggtttgcgcatacgcctgacgccacccacctgcgtatcgacgccgtgccgctgcccggcgacccggcggccctggcgctggcgcagggcgcgcgcatcggcctgctcgggatcgagctgcctacgcgccggcgcaaccgcatgaacggggtcatcgtggcgcgcgacgagggcgggatgacagtcgaggtcgagcagagctttggcaactgcccgcgctatatccagttgcgcgacgtgagcctggccgagccggcgcccgcgccgcccgcctggcacggcgacgcgctggatgagcaggcggtggcctggctgcgcggcgccgataccctgttcatcgccaccagcaacaccgcatctccgcaggacgagggcgagcacaccggaggcgccgatgtctcgcaccgcggcggcaagcctggctttatccgcgtcgacgaggccggcacgctgacgttcccggacttcaacggcaacaacttcttcaatacggtcggcaacctgctggccaatccgcaagccgggatcgtggtgccggattttgccgatggctcgctgctgcatgtgggcgggcgcgccgaggtgatctgggagggcgatgaactggcgtcatacgccggcgccgaacggctggtgcggctgcatgtcgagcgcgtggtgcggcgtgcggcggtattgccgctgcgcttcggttttcgcgaatactcgccggtgttggcggacacgggcgcgtggccggtgcgttgagtccggtagtccgggagattgtcataaaaatgacatcagaaagtcacaaaagagtcacaatggcggctggcgactgttcgtagcacccggaaccagggcgctggcgggcagccctgtatcaaggagaaatcaaccgtggacaagacgaagaacaagccgcaagcccgccgggacatcctgagacacgcactgctggccctggccgccgcgccgctggcactggcggcggggaccgcgcaagcggcctggccggaaaagccgatccggctggtggtggcattcccgcccggcggcccggtcgacacgcacgcgcgcctgctggccgaaaagctgcagccgatcctgggccagaccatcgtgatcgactacaaggccggcgccgccggcaatatcggctcggacaacgtcgccaagtccgcgcccgacggctacacgctgctgctggccaacactgggcagatggccatcaacaactcgctctatcccaagctgccctacagcatgccgaaggacttcgcgccggtggcacgcacggcgctgatcccgctggtgatggtggtcaacaacaacgtgccggcgcgcgacctgaaggcgttcatcagctatgccaaggccaacccgggcaagctgaactttgcctcgggcggcaatggcggcatctcgcacctgatgccggaaatgttcaagcaggcttcgggcacgttcatcgtccatatcccgtacaagggcagctcgccggcgctgaccgacgtgatgggcggccaggcgcagatgatggccgactcgatcccgctgttcacgcagtacatcaaggcaggcaaggtgcgtgcgctggcggtgacgtcgccgcagcgctctcccgcgctgccggatgtgccgacgatgcaggaggccgggctgaagggcttcgaggtggttggcttctatggcatgctggcgccggcgggcacgcccagggaggtggtctcacgcctgtccggtgccttgcgcacggtgctggccgaccccgacaccaaggcgaagctcgagcagcagggtgccgagcccgcatggcagtcgccggaggcatttgccgccacgatcacggcggagcagaagcgctgggggcaggcagtgaaggcgtcgggcgcaagtatcgactgagccgggcgggcacccgcgggtgccgtggctcatggctcagctgcggccccgatatttcaggcttgcgcagtggccgacgagcgcggtgatgcagcaggcatcgccgcgccattcgccgccgatgacgatgccgtcctggccggtcaccagcttgcgctggcattggcccggtaccggcgtgcgctccatgccggcatcgcgcgggccgctgcccggggggcgcgcgggcgcaatcgaatcgttccagacataggccgtgccggagggcaggacctgcaccgattgcggcggaccccactggcgcttcgcctcatcgacggggacgtttttccaggaatcgaagacgtcctgcatggcgctggcctccaggccggcgcaggcaccggtgatggcagccgcccacaagacggccaggcttgcacgcacgctgacggcgccgcgggccgtttcggccggaaggattgggttggctggcatgtaggctccgcatcggcgcagccggctgcaagggccggcctgtgcaggctagcggagccgcgtgcctcgctgcaagcgtgctctgcgcgatgacgcacagagcgtggccggcttcagtcggagaccaggcccaggggttgctgtgcggcagccggtggcgccttgcgggcagtctgtccggccgggatgcgtgccgggcgtggcgcccgggcgggggcctcgggggcggtcagcgtgaacggcctgtgcacggacagcggcaccgcctgcggcatccattgcgccagccgcggcgcgaggatctggtatgtatcgaggtcgaaatgcgctggtgctgccgccaacgcctgcgcttcttccagcgtggctgcgcagcccaggtagcaccagtcgtcggcgacatgccaccaggtgcgtccgtcgtgctgctcgcgccaggcagccgggccatcgaagggccagggcatcagcgcgatcggcgccagcgcggcggccagccgggcgcggtgcgcgcccgacggctcggcgccgacgcaggcaccggcgcagcgatggacctggcgcgcaaagcaggggctgccacggcgggtggttttctccagcgacagcgtggccaggcacaggccgtgttcctgcgccagcgcgcgcaagcgagcctcggccgcgccgcggctgccgaacacgccgaacaggtcgcgatgccggcagaaatccgtatctcgatccgagcgcaggcgtggcaccggcagctgctgcggcagttcccaggcatagagccgggcattgcggcgcagcagctggttgtgcaccggctgcatcgccttgaccagccgggcttcgagcagcagcgcgccggtctcgccgccggtctcgcgccattccacacggcgtaccagccgggccagccgcatatccttgccgtaccggtagtcgccggagaagtgggcgccgatccgttgccgcaggtgcacgctcttgccgatatagagtggcacgtcctggtcgccatagaagatatagacaccgggcgccgccggcacgtcttccagcgcggtttcgtccaggccggccggcaggctggcccgccgcaccagcgtgcgcacggccgattccaccaggtcgaccgaatacgtggcatggatcttctgccagaactgccacagcagctcggcatcggccagggcgcggtggcggcccttgggcgtcaggccgaagcgcgcgatcagcgcatccaggccgtggcgttccacggaggggaacagcgagcgcgacagccttaccgtgcacagcacgtcggcccggaaggtcacgccggcacgtcggaaggcgttcttcaggaagccatagtcgaagcgcgcgttgtgcgccacgaacaagcggccttgcaggcgttcggcaagcgattccgccagtgactcgaagctcggctggccgcgcaccatctcttcggtaatgccagtcatgcgctggatgaacggcgggatcgacatgccggggtcgagcagggtgtcccattcaatgatgccgtccgggccgacttcgaccacgccgatctcggtaatgcggtcgcgctgggcgtccgcgccggtggtctccaggtcgacaaagacaatagggcgcgacagcgccgcggcgagagcttgggcgtcgagcaggcgcgccccgtccgctggcaggcgcgacggcaggtaggtaggcatgtcaggcatttgccgattctaaggcggcgctgatggtggcacgaagaagttttcaaaaaccccttgccaaccccgctgcggtcacttaatattcgccccctcgcaacacacaacgcagcgctgcaaagcagacgcagcaagggttgcggggtcgaccgggatggttggcgcagcgaagtttgcagcgctgaccgcagcgaaaaaagatgctgaaacggttgacgaaacgaagaaagctctgcataatctcgtttctctgctgcagacaacgcagcggcgctgaacggcaaagccggcggcgaagttctttaacaatcaaacaaccgataagtgtgggcgctgggtagcggacgccactgtcttcggacagtgttgcttcacaagttatacagtgctcgcacagcaaaacgtgactggatcttcggatctggtcagtcagttttctgagagtgagcgaccgctcgaaagagcgaggaccctcgggtccacacagagattgaactgaagagtttgatcctggctcagattgaacgctggcggcatgccttacacatgcaagtcgaacggcagcacgggcttcggcctggtggcgagtggcgaacgggtgagtaatacatcggaacgtgccctgtagtgggggataactagtcgaaagattagctaataccgcatacgacctgagggtgaaagcgggggaccgcaaggcctcgcgctacaggagcggccgatgtctgattagctagttggtggggtaaaggcctaccaaggcgacgatcagtagctggtctgagaggacgatcagccacactgggactgagacacggcccagactcctacgggaggcagcagtggggaattttggacaatgggggcaaccctgatccagcaatgccgcgtgtgtgaagaaggccttcgggttgtaaagcacttttgtccggaaagaaatggctctggttaatacccggggtcgatgacggtaccggaagaataagcaccggctaactacgtgccagcagccgcggtaatacgtagggtgcgagcgttaatcggaattactgggcgtaaagcgtgcgcaggcggttttgtaagacaggcgtgaaatccccgagctcaacttgggaatggcgcttgtgactgcaaggctagagtatgtcagaggggggtagaattccacgtgtagcagtgaaatgcgtagagatgtggaggaataccgatggcgaaggcagccccctgggacgtcactgacgctcatgcacgaaagcgtggggagcaaacaggattagataccctggtagtccacgccctaaacgatgtcaactagttgttggggattcatttcttcagtaacgtagctaacgcgtgaagttgaccgcctggggagtacggtcgcaagattaaaactcaaaggaattgacggggacccgcacaagcggtggatgatgtggattaattcgatgcaacgcgaaaaaccttacctacccttgacatgccactaacgaagcagagatgcattaggtgcccgaaagggaaagtggacacaggtgctgcatggctgtcgtcagctcgtgtcgtgagatgttgggttaagtcccgcaacgagcgcaacccttgtctctagttgctacgaaagggcactctagagagactgccggtgacaaaccggaggaaggtggggatgacgtcaagtcctcatggcccttatgggtagggcttcacacgtcatacaatggtgcgtacagagggttgccaacccgcgagggggagctaatcccagaaaacgcatcgtagtccggatcgtagtctgcaactcgactacgtgaagctggaatcgctagtaatcgcggatcagcatgccgcggtgaatacgttcccgggtcttgtacacaccgcccgtcacaccatgggagtgggttttgccagaagtagttagcctaaccgcaaggagggcgattaccacggcagggttcatgactggggtgaagtcgtaacaaggtagccgtatcggaaggtgcggctggatcacctcctttctagaggcttgtgtctcaagcctagcgttcacacttatcggtttgtttgctgttacagccaagggtctgtagctcaggtggttagagcaccgtcttgataaggcgggggtcgtaggttcaagtcctaccagacccaccaagttatccggaagggggattagctcagctgggagagcacctgctttgcaagcagggggtcgtcggttcgatcccgtcatcctccaccactgcctggtaccttggattggttgtcaaatgaaagcgcatcgcgacgatgagtggcgagtgtttccatttggcattgccaagcgatcgcaagatcggctgttctttaaaaatatgggatgtagtaaaggtgtcgcgcgagcgttgatgagacgctgcagtacaagacgcgataccgggttgtgattgtatcaaccaaaatgtatttaagtgatcgaaagatgacttggaatacggcacaaatgcgagaactcatcctgtagcgaggtttcgagcaatcgagacacactcgttatagggtcaagcgaacaagtgcatgtggtggatgccttggcgatcacaggcgatgaaggacgcggtagcctgcgaaaagcttcggggagctggcaaacaagctttgatccggagatgtccgaatggggaaacccggcccgaatgggtcatcccacactgaatccataggtgtgggaagcgaacgcggcgaactgaaacatctaagtagctgcaggaacagaaatcaaccgagattcccaaagtagtggcgaacgaaatgggaagagccttgtactctttagcagtggtgttagcagaacgggatggaaagcccggccctagcaggtgatagccctgtatgcgaaaacacgattgtggaactaggtgtacgacaagtagggcgggacacgtgaaatcctgtctgaagatggggggaccatcctccaaggctaaatactcgtgatcgaccgatagtgaaccagtaccgtgagggaaaggcgaaaagaaccccgggaggggagtgaaatagatcctgaaaccgcatgcatacaaacagtcggagcctcgtaaggggtgacggcgtaccttttgtataatgggtcagcgacttacattcagtggcaagcttaaccgattagggaaggcgtagcgaaagcgagtccgaacagggcgttgagtcgctgggtgtagacccgaaaccagatgatctatccatggccaggttgaaggtgcggtaacacgtactggaggaccgaacccactaacgttgaaaagttaggggatgagctgtggataggggtgaaaggctaaacaaatctggaaatagctggttctctccgaaaactatttaggtagtgcctcgtgtctcaccttcgggggtagagcactgtcatggttggggggtctattgctgattaccccgccatagcaaactccgaataccgaagagtgcaatcacgggagacagacatcgggtgctaacgtccggtgtcaagagggaaacaacccagaccgccagctaaggtccccaaatatagctaagtgggaaacgaagtgggaaggctaaaacagtcaggaggttggcttagaagcagccaccctttaaagaaagcgtaatagctcactgatcgagtcgtcctgcgcggaagatgtaacggggctaagctatataccgaagctgcggacgcgtgcgctcctttaagtgcaccaagcttgtcgatgcgcagcatcgacaaagcacccaaacaatgatcgttgggtgtcaatgctagtggatttaaaggagcgtacgcgtggtaggagagcgttctgtaagcctgtgaaggtgtcttgtaaaggatgctggaggtatcagaagtgcgaatgctgacatgagtagcgataaagggggtgaaaggccccctcgccgtaagcccaaggtttcctacgcaacgttcatcggcgtagggtgagtcggcccctaaggcgaggcagagatgcgtagctgatgggaagcaggttaatattcctgcaccgtcgtatgatgcgatggggggacggatcgcggaaggttgtccgggtgttggaagtcccggtccctgcattggagaaggcgctcaggcaaatccgggcgcgggattcaaggatgcggggcgagcggcctagtgctgcgaagcaattggaagtggttccaagaaaagcctctaagcttcagtcatacgagaccgtaccgcaaaccgacacaggtgggcgagatgagtattctaaggcgcttgagagaactcgggagaaggaactcggcaaattggtaccgtaacttcgggataaggtacgccctggtagcttgactggcctgcgccagaagggtgaaggggttgcaataaaatggtggctgcgactgtttaataaaaacacagcactctgcaaacacgaaagtggacgtatagggtgtgacgcctgcccggtgccggaagattaaatgatggggtgcaagctcttgattgaagtcccggtaaacggcggccgtaactataacggtcctaaggtagcgaaattccttgtcgggtaagttccgacctgcacgaatggcgtaacgatggccacactgtctcctcccgagactcagcgaagttgaagtgtttgtgatgatgcaatctccccgcggctagacggaaagaccccatgaacctttactgtagctttgcattggactttgaaccgatctgtgtaggataggtgggaggctttgaagcgtggacgctagttcacgtggagccgtccttgaaataccaccctggtttgtttgaggttctaaccttgacccgtgaatccgggtcggggacagtgcatggtaggcagtttgactggggcggtctcctcccaaagtgtaacggaggagttcgaaggtacgcttggtacggtcggacatcgtacctaaagtgcaatggcaaaagcgtgcttaactgcgagaccgacaagtcgagcaggtgcgaaagcaggacatagtgatccggtggttctgaatggaagggccatcgctcaacggataaaaggtactctggggataacaggctgataccgcccaagagttcatatcgacggcggtgtttggcacctcgatgtcggctcatctcatcctggggctgtagccggtcccaagggtatggctgttcgccatttaaagaggtacgtgagctgggtttaaaacgtcgtgagacagtttggtccctatctgccgtgggcgttggaatcttgacgggggctgctcctagtacgagaggaccggagtggacgtaccgctggtgtacctgttgtctcgccagaggcatcgcagggtagctatgtacggaagagataaccgctgaaagcatctaagcgggaaactcgcctgaagatgaggattccctggcggcttgaccgccttgaagggtcgttcgagaccaggacgttgataggctgggtgtggaagcgcagtaatgcgttaagctaaccagtactaattgcccgtaaggcttgatcctataaccagtgtgttttgcctggtgagtcgatcgccttgtgccagatacgcacaaccccaactacatccctattcgcagcgttgacctcaacctcagcgctgcaacccctcatgcctggtgaccatagcgagctggaaccaccccttcccatcccgaacaggtccgtgaaacagctccgcgccgatgatagtgcggattcccgtgtgaaagtaggtcatcgccaggctcttattccgcagaacccccagccccaaaaggctgggggtttttgctttggcgcggcggaaaatcacgcccgcgcccctcatgccgtcatccgccggtccgcgacagccagcgcaacgccggccaggcagcagcctccaaccagcaatgcggctggcacggtgccgtgcactgccagtgagctggccgcaaccggcatcagcatcagcacagccaggttgttgatgctttccgagacggccagaatctgtccctttgctgcgccggcccgccgagccaggatggcggtgctagatggcgccgcgatgccgagtgccgcgccccacgccagcaggcagccaagcgacccgggcaaccccaagacgcctgttgtgaacaaggtcagggccacggcgacaagcgcggtggccactatcaaaacactttcctcgcgcgcgaagcactggctggcacgccctgccagcagattgccaacggccaggccgaggccgaacaccgaaagtgccgcgccgacgccgggcacgccgagcccgtaacgcagccgcagcacttcccccgctagtacataggccgctacggcgcttccattccaggcgcctttcgcgatcaatggaagcaggatgcctgaagatgctgggatgttcctggatttttcctggcagtcgccgctacgcggcagattgcgcggaagtacgtggcagccggcaagaagggccgccaggcaaccacctgcggtgacaaggaagggagcgcgccagccgaatccatcggccagtaccccggccactgccgggcctgcggcaatgccggcggtcatgcctagcatgacgccgcccatggcgccagcctgccgcgccgggggaaccagatctgcaatcaatgcgaagacggtgggaatcgtggccgcggcggcgagcccgccgaggatacgcaatgccatggcggcatgcagcgtagggacgagcgtgagggcgatgccatcgagtgcgaacaacagcaatgcagccagcagcacgcggcgccgtccggcacgatcggagaaccagcccatcaacggcgcggccaaggcataggaaagggcataggcagaaatgagtcccgatgcgcgcgccggggtggtggcaaaagcgtctgcaagcggcgccagcatcggtgacaacatgaattcagcagcgccgaccatgcacacggcgagggcaagcacgggcagcaggcaaggagatggcatagggtagcctcctcgggcttcaacattgatgggacgtggcgataccggccaagacgtgcgaaacgcgacgtaacaagggcgcattgccgcctaacagtgggtaaatccggaaaatgaatgcgccgctgagtcgggcaagatggggatggtgcgagccggcaccgggtactgcgagaaggggcgattcagaaagatcgccgggaagtcagggatgattctatcgtattgccagcaatcaggggccaccggtgcccaggcaccggtggcatggcggaaagttagtcggcctcgatctgcatcgacttcagcagcggctgccacttgtcgctctcagccttgagcagtgtgcgcaggccttccggcgtctgcttgtcgaccggcacgatttccgcacccaggccatcgagtttcttgatcaccacgggatcttgcagccccttctgcagcgccttggtcagccgcgccactgcagcgggcggcgtgcccttgggcgcgtagatgccgtgccagaccttgacgtcaaagcccttgagaccgccttcctgcagcgttggcgcactgggcagcgccttgatccgcgccggcgtggtcacgccgaacaggcgcacgcggtcggcctggatatggggcagcgtggccgtggtctggtcgcacagcaggtcgacctggccgcccagcagtgcggtcagcgcggggccggcgccctggtaaggaattgcattgagcttgacgtggaccgattgctcgaacagcacgccgcatagttgcgatacggcgcccagcccggcattggccagcgacaccttgtccttgttctgcgtcacgtagcggatcagttccggcacggtcttggccggcaggtccttgcggcccatcagggtcatcggcacgtccgcgacctggccgacatactcgaaatccttcagcggcgcgtacgacagcttcttgtacagtgccggcgcggtcgccatgccattatggtggatcagcagcgtatagccgtccgcctgtgcgcgggcgacaaaggcggcagccacggtgccgccggcgccggtgcggttttccaccaccacgctctgaccgagatcctgcgacatcgcctgcgccagcgtgcgtgccacgacgtcggtcgggccgccggcggagtaggggacgaccagcgtgatcggcttgccggggtaggcgtcagccgctgccgcggcgcttgtgccagccagcgccgaggccatcaccatcacgcccgccagccatcgtggcccggcgcgcaaatccttcgcatccttcattgctgtctccagattggtgccgcgccgtgagtccggggcggcttgtcggggttgcgcggctagcatgggggtatgccgccgcgaccgcaatctggttctcgtgaagggtgcctaatccgtgatggaagatcaggccggctggctggtagcccggttgcctcggcactgcactggtcaggcgacctcggccacgcgcacttccaccagcagcttcttcagttccggcacgcacgagccgcagttgccgccggccttgacgcaggcggtgatctccgcgggcgtcttcaggtcgtgcttgcgcacggcgtcgcagatggtgttgcggcccacgccaaagcacgagcacaccgtcgggccggtgtcggcgcctttctccatcggctggccgagcagcaggccgatgcggtcggcgtcttccagccgctcgcggccgaacaggccggcgagccacgcgcgtgagggcaactcgggccgcgtcgaaacgtagacgcacgcttccagccggtcgttgacgacatagcccgcatggtagacgccggcggtgcggtcctcgtactcgagccagtcggcgtccggatcggtcacgccgagcagcgcgcgggcccaggcggtgcggtcggccacggtgtcgcggccggcgaattcatagcgctggaactggcggccctgcacgcgcgtccagtaggtcagcgcttccgcgggcagcgcgctgcggctcagcacgaaaccatgccagttcacgccgaatggctccacccgtactggcgtgtgcttgaattcgggctcgccggaaacgggatcgaccacgggattgaccagcgcgccgacgcgtgcgtcggagctgaactggccgttccagtggatcggcacgaacacgctgccgcgcgggatgccgccgccatggcgcacgcgtgccaccatcgcgccccagcgcgtgctgacgcgcgcgagcttgccttcgcccacgccggacagcagcgcgtcctgcgggtgcatgtcgacgaagggctcgggcaggtggtcggccagcttggccgacttgccggtgcgcgtcatggtgtgccactggtcgcgcacgcggccggtgttgaggatcagcgggaaatcgtcgtcgggcgcgtgggccggcgcgcgcggcggcgtggcgacaaagcgggccaggccgtcggcatgggcgtagcggccgtcggcaaacaggcgctgcgtgccggcgccagccggtgcgcccgctggcagcggccattgcacgggctccagcgcgtcatagtgctcctggtccaggccggccagcccgccgatgtcgaacacgcgcggtgcggcatcgttgcgccaggcgctcaggcgtgcgtgctcgtcgaaaatctcatgcacgcccgcatagtcgaagccgtcaaagcccatgcggcgcgcgacgtcgcacaggatccgccagtcggcgcgcgcctcgccaggcgcgggcaggaaggcacgctggcgggaaatgcgtcgttccgagttggtaacggtgccgtctttctcgccccagcccagcgcgggcagcagcacgtgcgcggcagcattggtgtcggtgcgctcgatgatgtcgctggtgaccaccagttcgcacctggccagcgcgcggcgcacctggtcggcgtcgggcaggcttaccaccgggttggtggcgatcacccagaccgccttgacgcggccggcttcgatcgcctcgaacagttccaccgccttcaggcccgggcggtcagccaccaccggcgattgccagaagctctgcacgatgtcgcgatgcagcgggttggccagttccatgtgcgcggccagcatgttggccaggccgccgacctcgcgcccgcccattgcattgggctggccggtaagagagaacgggcccatgcccggggcgccgatgcggccggtcagcaggtggcagttgatgatgctgttgaccttgtcggtgccggccgacgactggttgacgccttgcgagaaggcggtcacggtcttttccgtatccgcgaacagctggtagaacgccagcacgtcctgcacgtccagcttgcaggcgcgggccacggcagcgggatcggcgcaggccgcgtccgcggcctgcagggcttcatccagccccgcggtgctggcggcgacgaaggcggcgttggtgcggccttcgcgcgccaggtagctcagcagcccgttgaacagccacacgtcggtgcccgggcggatcgccaggtgcaggtcggccagttcgcaggtggcggtgcggcgcgggtcgatcgccacgatcttcatctcggggcgcgcttccttggcccgggacaggcgctggaacaggatcggatggcaccacgcggtgttggagcccaccagcaccaccaggtcggccagttccaggtcttcgtagttgcccggcaccaggtcttcgccgaaggcgcgcttgtggccggccactgccgacgacatgcacaggcgcgagttggtgtcgatattggcgctgccgatgaagcccttcatcagcttgttggcgatgtagtagtcctcggtcagcagctggcccgagacatagagcgcgaccgaatccgggccgtggcggcggacgatgtccgagaagccttgcgcgacggtgtccagcgcatggtcccacgagacttgctgcagggagccatcggtgccgcgcaccttggggtggagcaggcggccttccaggtccacggtttcaccgagcgccgagcctttcacgcacagccggccgtgattggacgggtgctgcgcgtcgcccgcgatctcgacctggccgtcggcgcgcacggtggcgcgcacgccgcagccgacgccgcagtacgggcaggtggtggcggtggtggtggtcagggtcgccgagacgaccgggatgtcggacaggttcacgcgttctccgtgcgggggcgttatatggcttacggtgatgcttatgcggcgagcgcttcgcactgcgcctgaccgaacagcaggcgctggcgcagcgcgcccaccggcgtgcggcgctggatcatgtcgaagtaccaggggccgtcctgcacgtcgccgtacagcacggcgccgaccagatagccgtcctgcagcaccaggcgcttgtagacgccgcggcgcgggtcgcgcagcaccaggtcttcactgccttcggcgccgatgaagtcgccggcggaatacaggtcgacgccggtcactttcagtttagtcgcggtggcctgctgcacgtagtggcgatggccggcgccggcgaggtgcgcggcgcacacgcgcgcctgatcccagatcggcgccaccaggccgaaggtggcctggcgatgctgcacgcactcgcccacggcgtagatgcgcggatcataggtctgcagcgtgtcgtcgacgacgatggcgcgctcgcagtgcaggccggcgccggcggccagctcgatattggggcgcacgccggcggtcatcaccaccaggtcggcggggatctcgctgccgtccttgaagcgcacgccggtgacgcggtcgatgccgagaatctccgcggtctgagcgcccagcaggaagcgcaggcccttgcgttcgagcgcgccctggagcagcgtggcagcgggcttgtcgagctggcgctccatcaggctgtcgggcaggtgcaccacggtcacgtccatgccctggcgcagcagcccgttggcggcctccaggccgagcaggccgccgccgatcaccaccgcatggcggtggtcgcgcgcggcttgctgcatggtctccacgtcctggatatcgcggaaggcgatcacgccgtcgagctggtgccccggcaccggcaggatgaagggcttggagccggtggccagcagcaggcggtcgtagcgcacttcgcggccggaggccgagcgcacgatgcggcgcgggcggtcgatggccaccaccggatcgccggcaagcagttcgatgccatgctcggcgtaccactcgcgcgtgttcagcatgatgtccgctaccgtcttctcgccggccagcaccggggatagcaggatgcggttgtagttgccgtgcggctcggccccgaacaccgtgatgtcgtacaggtccggggcgagcctgagcagctcttccacagtgcgcatgccggccatgccgttgccgacgacgaccaggcgcgggcgggcttggggggtggcggaaggcgtcatgccggcatctccgttggcgtggcttgaggacagggggaacatcaaatgggcgccggtgtcaggctgcgagttcttcctcggcctcgctcacggccacgccggcggcaatccagaccttgccgtcatagacgcgtgcggcgtaggcactgacggactgctcgggcgcttccaggcattcgccggtgcgcaggtcgaagtgatgcttgtagatcggcgaagccaccaccaggcgctcgccgaggttgccgaccagcccgcgcgacagcaccgcggcctgcgagttgggatcgaagttgtcgatggcgtagacttcgtcgccacggccgatgcggaacacggcgacctgcttgtcgtcgaccagcgcgcacacaccagtattgggcacgatatcgcgtacggtgcagacggcggtccaggtctcaggatggtggggatggctcatcacgttctccttgtttgcggcacggtcaggctgcttttgcgggcatggcaaccacgggaatctggctcaggcgagaacgacgcaatttccgttcctccggcgtggccgggcggatctgcccgcgctcttcgacaaaggcgacgttgtcgtcgcggcggtcgctgttgacgaaatggcggaagcgcttgcgcgtctcgggatcggtcacggccttcttccactcgtcttcgtaggtgtcgaccacatgctgcatctcggcttccagttcggcggcgaggcccagcttgtcgtccagcaccacggccttgaggtagtccaggccgccttcgaggttgtcgcgccagacgctggtgcgctgcaggcggtcggcggtgcgcacgtagaacatcaggaagcggtcgatgtagcgcaccagggtgtcgtggtccaggtcgctggccagcagctcggcgtggcgcggcttcatgccgccgttgccgcacacgtacaggttccagcccttgtcggtggcgatcacgccaacgtccttgccctgcgcctcggcgcattcgcgggtgcagccggacacgccgaacttgatcttgtgcggcgcgcgcaggcccttgtagcggttctccagctcgatcgccaggcccaccgaatcgcccacgccatagcggcaccaggtggagcccacgcacgacttcaccgtgcgcagcgccttgccgtaggcatggccggactcaaagccggcggcgatcagttcttcccagatgaagggcagttcctcggcgcgcgcaccaaacaggtccacgcgctggccgccggtgatcttggtgtagagaccatacttcttggccacctggccgaccgcgatcaggccctcgggcgtgacttcgccgcccggcatgcgcggcaccaccgaataggtgccgtccttctggatgttggccaggtagtagtcgttggaatcctgcaggctggcgtgctcttccttgagcacgaactcgttccagcacgaggccaggatgctgcccaccgcgggcttgcagatgtcgcagcccatgcccttgccatgcgcttccagcagcgcatcgaaggtcttgaacttgcccacgcgaaccaggtgatacagctcctggcgcgagtacgggaagtgctcgcagaggtggttgttgacggccatgccctgcttcttcatctcggccttcatgatctgcgtgaccagcggcacgcagccgccgcaggcggtgccggccttggtgcaggtcttgagcgcgccgatgctggtggcgccgtcgcacacggccgcgcagatctcgctcttggagacgttgttgcacgagcagatctgggcggtgtcgggcagggcatcggcgcccagcgcgggcttggccttgccgctgctgtcgggcagtatcaggaactcgggcgactcgggcagctcgatcttgttcagcatcatctgcagcagcgtgccgtactcgctggcgtcgccgatcagcacgccgcccagcaggtacttgccgcagtcggacaccaccagcttcttgtagacctccttgcggtcgtcgcagaactggtagaagcgcgcgcccggcacggtgccgtgcgggtcgccgatgctggccacgtccacgcccatcagcttgagcttggtgctcatgtcggcgccggcaaactcggcggcttcgccctgcaggtggcgcgcggcgacgcgggccatgtcatagcccggcgccaccaggccgtagatcttgccttgccacagcgcgcattcgccgatggcgtagatgtcgggatccgaggtgaggcactggttgtccaccacgatgccgccgcgctcgcccaccgccaggccgctggtgcgcgccagttcgtcgcgcgggcggataccggccgagaacacgatcatgtcggtgtcgaggtgggtgccgtcggcaaacaccatgcggtgggtgccgtcttcgccgtcgatgatctccaccgtgttcttgccggtgtgcgcggtcacgcccaggccatggatcttctggcgcagcatgcggccgccgccttcgtcgacctgcaccgccatcaggcgcggcgcaaactcgaccacgtgcgtttgcaggtccatgtcgcgcagcgccttggcgcactccaggccaagcaggccaccgccgaccactacgccggtcttcgagcgcgcaccgcattcgcgcatcgcttccaggtcttcgatggtgcgatagacaaagcagtccttgcggtccttgcccggcaccggcggcacgaaggggtaggaaccggtggcgaggatcagcttgtcataggacagggtctcgccggtcgacaccttcaccgtgcgcgcggcgcggtcgatctccaccgcacgcgcattcaggcgcagcagcatgttgttgtgctgctcgaagaagccggcgggcaccagcgacaggtcctcggctgacttgccggcgaagaattcggacaggtgcacgcgatcgtaggcgggacgtggttcttcgcacagcacggtcacttccacgttctgcgcgccggcttccgccaggcactccaggaacttgtgacccaccatgccgtggccgacgatgatcagtttcatgatgctttccttgtccggtagtcagtctttgctgcttgttgtgctgtgggggcgatgcttcaaaatcagctggccattgcgctgtcgtacagcgcctgctcctgggccttgtgctcggcggtgaagcggatggcgatggcgcaaagtgcggagatggtggcgagcacgcccagcactgtcagcgtgtgctgcaggtcgcccaggcccttgagcaggaagcccgcggcgacggcgccaacgttgccgcccgcgccgatgatgccggccacgccgcccagcgccttgcggtcgataaagggcaccagcgcgtaggtcgcgccgcaggccatgtgggtgaacaggccgaacagcagcatcgcgaccacggccagcgtcacactgccggcctgcgcgaaccacagcaggcccaggccttcgcccaggatcagcacgaacagcagcgtggcgcgtgcgtccaggccgcggcggcgcgccgccttgtccgacagccagccacccagggcgcgggcaaacagcgccagcaggccgaagctcgcggcggccatgccggcagccttcaggctcaggccgaagcggtccacgtaatacgaggcggcgatgttgtggatgaagatctcaacgccgaagcaggcgccgtaggtgatgaacagcagccacacgcggtagttggcgctggcggcgcggaagctggcccagccgccgcccttgccaccgtccttgccggtgatggcgatgccgcgggcgcgcaggtccgagtagttgccttccgggcagtcctgggtgaagcgccagtaaatgacggccatgatcagcatcagcacgcccggcaccagcagggcgaagcgccagccgaacgcgtggtcggcgccgagcatcagcacggcagccagcagcagcggcatgatggcctgtgcggcgccgccgccggcattgccccagccggccgcggccgcgttggcggtgccgaccacgttgggcgcgaacatcaccgaggtgtggtactgcgtgatcacaaagctggcgccgactgcgccgatcagcaggcggaaggtcaggaaggtctcgtagttctgtgccagcgccacgcccagcaccggcagcgcgcccagcgccagcaggccggtgtaggtcttgcgcgggccgaagcggtcgcacatcgggccaatcaccaggcgcaccaggatggtcaccgccaccgccgcgatattgatgttggcgatctggcccggggtcaggccgaactcgcccttgagcacaggcatcagcggagcgcaggcaaaccacgcaaagaagcagacgaagaacgccatccaggtcaggtggaaggcgcgcatctgcggggtcctaaagctcagcagctcgatgcgggtggctttggcggtcatcgtccttggctccaaaaaacaaatggcgtcccgcagaccaggccgctcaggccagttcaggggacgccgttgtcctgacagccactacatgggataggggctgcgtatgtggggtgggccggtcgccgttgacgggcccgtaccatgttacgcaaggggtgtgccaggccggcatgtgacggtgagtgggggtttgttgcgctgggtgcggcggagtgatgccgggatgcgctgtggtggggcggccgccgggctggcggcacactcatggtgcagtgcggtgggctgcgctggtgcgatgcaataccgcggtcggcgctactggtccgaagccggggactgggcgttgacgggaatgatccgcatatcgcgcggcgacacttccacgccgtcctcgtcgaccaatgccgcgcgcaccagcttgccgctggcgcgcgagcggatctgcaccgggccttcgccggacggggccatgtggctgtcgccccactgcatcaggccgaccagcaccggcagcaactcgacggcggcgcgggtggggcggtattcgaagcgttcgcgctcgccgggctcgcggtagccgaccttgcgcagcaggccggcgtcggtcagcgtcttgaggcgcgcggacagcaccgcgggcgagcattccagccggcgcaggaagtcgtcgaagcgcgtcacgccatggaagacatcgcgcaggatcaggatcgtccacttttcgccgatcagcgacagcgtcgcggcaatcgagcagtggcggaggtcggacgcattgagggtcatgatgccggcaagcatagcatgctgacttcatttgcaaaagtcaggttatctcctatactctgactacgaattttgaatccagagggtgccgggatggatgatcagagcgaggcccgcacgggcaaggcggaaagctggacggtgggacggggcgtgcaggtcacgctgcgccatacgcggcctcaggatggcggggcgctgcgcgcgctggtggatgggctctcgcgtgagagccgctacttccgcttcctgagcggcgggcgcgtggtggacgcgattgtcgacggcctggccgcgcccggacctggcggggtggcgctggtggtggaggcgcccgacgaagttggtgtctcagccattgtcgccagcgcggaatacgtggtgtccgggcaggtcggggaatttgccgtggtggttgccgacggctggcaagggcagggactggggcggcgcctgatcgccaggctgtgcgaactggcgcgcgcggccggcctgcgcaccctgcgcggcgacgtgctcagcgagaaccgccgcatgctggccatcctgcgcggcctcggctttgccagccgccgcaatccgcaggacagccacctgcatgaagtcacgctggcgcttggccagccggcgcgcagcccgcagcggctgccggcggactggttcggcgcgcgctgattaactggcgtcgcgcttgccgcgcgaggtcatggtgcaacctgccgaggccgtgatgatgctggcgatcgccagccattgcagcgcgctcagctgttcatgcaggaacgccagcccggccagcgcgcccatcgccggctccatgctcagcaggatgccgaaggtgcgccggtgcaggcgcttgagcgccaccatttccagcgaataggggatcgcgctcgacaggatgcccaccgccagcccgaacagcagcagcgtcgggctgaacatcgcggtgcccgcatgcgcgagtccgaacggcagcaccaccagcgccgccatggtcagccctagcgcggtggcctgcccgccgtgggcgttgcccgccatctgcccgaacacgatatacagcgcccagcccacgcccgcggccagcgcatagccgatgcccaccggatcgagcgtgccggcggcatcgccgaccggcagcaacagcagcagcccggccacggcaaaggcgatccacaggaaatcaattgcgcgccgcgacgacagcaccgcgaccgccagcggcccggtgaactcgatcgcgatcgccagccccagcgggatggtgcgcagcgacatgtagaacagcaggttggtcgcgcccagcgccgcgccgtacagcgcgatcgcgcgcgcgttggttcgcgtcagcgggatgcgccacgggcgccagacgcacagcaggatcagcgcggagaagctcacccgcagcgccgtggtgccctgtgccccgagcgccgagaacaggctcttggcaaaagaggtgccgatgcacagcgaggccatcgagccggtcagggccagcacggcgagcagggtcgagcgacggtgggcggcggtttgcggcaatttggggatcctgttttatggcgtggcctgtgcaatgctgccgcatcatgcggcaagcccggcgcgggcgccatatacaggtgcgggccagtggctcagtacagttggccgtgccccgggcacgccgctgctcagtgatcccgagctgccgccttgcgccgcttgccgggtttgctggcgcagtccgggcaacgccccagtagcgtcagctcgtggtgctccacttcgaaacccggtggcgtgatctcttccagatgcccggggcacccttccagcgggaagacgcggtcgcacgacaggcactggaaatagtgccggtgggtcgcggcacccggcacttccgacaattcatagcggtccggctggcccggcagttcgacggcatgcacctgctcgccttccaccagggcacggatgttgcggtagaccgtagccagtcccagtgagggcacctggtgctgggccgcggccaggatctcggccgggctcaggggccggccggcttcgcgcagcgcgtcgatgacggcgccgcgttgacgggtcatgcgttccatgactagaatcttaatgagaaattattatcattagtgagtcgctgcggtttgccagtcggatggccgccgccgcgactcgtttttattggggtgttccttatgctgcttgcgcagctcagccgtgcccggcgccgcgcgccgttttcgttccagcctgttgtgccagacctgcgcccggtccaggcgcgttcattgcggccggttgccgccctgatgctggcgatgtccggcctggccgaggcggcggataccaccgaggcctccgatattacgctgccggcggtgtcggtggtcggcacggcctccgcatcatacaacccgcccgacgcctccggcgcgacccgcaccgacacgccgctgcgcgaaattccacagtcggtgcgcgtggtgccgcgcgccatgctggacgatatcgccgcgacccgtttcgcccagaccttcgactatgtcagcggcatcgcgcgccagaacaacttcggcggcctgtgggacaacttcgccatgcgcggcttcaccggccatgagaacaccggcgcgggctacctggtcaacggctttgccgccaaccgcggctataccgcgccgatggatgcggccacgatcgaacgcgtggaagtgctcaagggcccgacgtcatcgctgtacggcaccagcgagccgggcggcaccttcaacgtggtcacgcgccagccgcagttccggcctgcgcagcgctatggcttcgagcttggcacgcgcgacggctatcgtgccacggccgatgtcaccggcccgcttggcgagaacgtggccggccggctgatcgccgtggccgaccaccagggcagcacgcgcgactacatcaacagccagcgctacctggtggcgccgtcgttcacctggaccctgggcaacgacaccgtgctgcagtacgcggccgaattccagcgctacaccacgccgatggaccgcggcgtggtggccgtcaacggccagctgggccgcatcccgcgctcgcgcttcctgggcgagcccggcgacggcgacatgcggctggacagccagtcgcaccagctcagcgtggagcaccagttcagtcagaactggaagggcaggctcggcctgtcctaccgcggcggcgcactgacgggacatagcagcgaggcgacttcactggccgccgacggccgcacgctctggcgccagcgccgctaccgtgacttccagtcggacgatgtctcgctgcaggccagcgtgaccggcaagttcagcaccggcccggtcgggcatgaactgctgatgggggtggatgcctaccgcttcggcaataccatggcgatcctgcgcaagaaccccagcgccgcggcgccgtacgcgatcgacatctacgacccggcctatggccagccggcgccgccgatgccgtggaacatggacacgtacgagcgccagcgcaatctcggcgcctacgcgcaggaccagctgagcctgggcgagcgctggcgcgtgctggccggcgtgcgcttcgacgccttcgaccagtcgctggacaaccacctgcgcggcacgcgcaccacgcagcaccagaacgcagtgtcgccgcgcgtgggcgtgagctacctggccagccagaacgtgtcgctgtttgccaatgccagccagtcattccgtcccaatgccggcgccgacgccgcggggctgccgttcgaccccgagcgcggccgcgcggtggaggccggcatcaagttcgacagcgaggaccgccgcagcggcgccacgctggccatctttgagatccgcaagcgcaatgtgctggccaccgacccgtccgatccctccttctatatcgccgccggcgaagcgcgcagccgcggcctggagctggatgtggccgggcagcttggcacccactggcgcgtatcgggcagttttgcgctgaccgatgccgagatcacgcaggacacgcgcctggccgccggcacgccgctgtccaacgtgccgcgcaccagcggcagcgtgctggcggtgtacgaggatgccgcgccggtgggccagcgctatggcgttggtgccggcctgcgttatgtggggcggcgtccgggcgatgtgcaggacagcttctcgctgccggcctatgtgctggtggacctgcatggctactggcaatacagccgcaacgtgcgcgtgtcgctcaacgtgggcaacctgttcgacaagacctattacgccagttcgtacagcagcctgtggattgcgccgggcgcgggccgcagtgtgcggctgggcgtgcaactgagctattgacgatgctgccagccaaggcgcgcactgccgcgcccctgtcttctccgacagatttcccttctgccgcggtcgcgcggccggccggcggccggctgctgtccatcgacgctctgcgcggactggtgatcctgatcatgctgctggaccacgtacgggacatgttcttcctgcacgtccaggtggccgatcccatggatgtcgccacgacctctccggcacttttcttcagccggctcgccgcgcatctgtgcgcaccggttttcatctggctggccggcatatcggtgtggctctacggtgccgccgggaacgaccggcgcgccgtcagcggcttcctgctcaggcgcggcgtgttcctggtgctgctggaggtgacgctggtcggctttgcctggaccgggaccttgccgccgcaggtgatctacctgcaggtgatctgggccatcggcctgagcatgatggcgctggcggcactggtgtggctgccgcgggcggtgctgattgccgcgggcattgcgctggttgccggccacaacctgctgagcccgctgcatttcccggtggacagcgcctggcacgtgccctgggccatcctgcacgaccgcacctggatcgaggtggctgatggtttcagggtgcgtacctcatacccggtgctgccgtggatcggcgtgatcgcgctgggctatgcggcggggccgtggtttgccgtcacggtgcctgccgcggtacggcagcggcggctggctggatgcgggctggcggcgctggcaggctttgcggtgctgcgcgcgctgaacggctacgggcaggagcagaaatggctggcgggcagcgacgccttgcataccgcgatgagcttcctcaacgtcaccaaatacccgccgtcgctgctgttcctgctgctgacactgggcgtgggctggttgctgctggtgtggctggagcgagcgcagggcagctggatcgcgcggcgcctggctgtgttcggcgccgtgccgatgttcttctacctgctgcacctctacgtgctgcaggggctgtaccaggcttgcgtgcaccgctggggcctgaaccagggcaaggtgttcggcctcgaccacgtctggcagctgtggctgggcgcggccgtgctcgccctggcgctgtggccggcggtgcgctggttcgcggcgctgaaagcaaggcggcgggactggcgctggctgaagtacttctgaccagcgcctgggtcccgcacgtcccggctcagcgcggcgtggccgcgacgggtgccggctgtgccgccgccggggattgcgccggagcctgaggttgcgctgcggcctggggctgggctgctgcctgagccggtgccacggcttgaggctgtgtggcggcttggggccgtgccacggcctgaggttgcgccgcggctggaggttgcgccgcggctggaggttgcgccacggcctgcggctgcgccacggcttgaggccgtgccaccgcctggggctgtgccgcggcttgcggccgcgcggcgggtgcctggcgtgcgccgccattggccgccggggcggcctcggtcacctcgcgccagccgccgccgagcgacttgtacagcgatacgcggctggtcaggccggccagcttgtacgtgatcagcgcctgctgcgcggtgtagagctggcgctgcgcgtcgaacacgccgaagtagtcgtccacgccgttcttgaaacgcatttccgacagccgccgggtctcgctgccttcgcgcaccagcgcttcctgcgcctgcacctggcgctcgtaggtggcgcgtgccgccatgctgtcggccacttcgcggaacgcggtctggatggtcttctcgtagttggcgatgttgatgtccttgcgcacgttggccgcatccagcccggcccggttgcggccggcgtcgaagatcggcacggtcagctgcggcgcgaacacccatgccatgccgccggagaacagccccgccaggctgctgctggccacgcccagcgcgccggtcagcgagatgcgcgggaagaacgccgcgcgtgccgcgccgatattggcgttggccgccttgaggcggtgttcggcgttgaggatgtcggggcggcgcaccagcacgctggacggcagcccttcggggaactcgctcaccagggtgcgcgcgtccagcggatctcgcgcggcggcgttggcgttggccgttgccgcgccggcatcggtcacggatttcggcaacgggccgccgatcagcaaggacagcgcgttctcatcctgcgccacctgccgcgtgtattgctcaacgccgacctgcgaggtctgcacctgggtttgcgcgcgatgctggtccagctgcgccatcgcaccaacctgccgcccgcgccgcaccatctccgccgcgtcctgctgcgtcttcagcgtgtcctgcgacagcttcagcagcgcgcggtcggccagcagcgtcaggtaggcgttggccacctcggacaccaggctgatctgcgcgctgcggcgcgcttcctcggtggccatgtattcctcgagcgcggcatgcttgaggctgcgcacccggccgaagaaatcaagctcgaacgccgtaaagccgatgcccgcgttgtaggtggtgatctgcggcgactggcccgccgcgcgcagccgttgcggcaaccgctgcgagaccatgccggcattgccttccaccgtggggaactgcgccgcgcgctcgatctggtacagcgcgcgcgcttcgtcgatggcaagcgtggccatgcgcaggtcgcggttgttggccagcgccagttcgatcagctggcgcagttgcgggtcgacgaaaacatcgcgccatcccaggtccgcggccgaagggccggcgggttgagccggctggcccggctgcgccgcaccggcctgcggggtgcggtaggcagcgccctccggccacgccgacgggaccggcgcgtcggggcgctggtactgcggttcgagcgtgcaggcagcaagggccagcacgagtgcgccgggcagcagcaggcgcggcgggggcagggtacgggggcgtggcaggcttcgcatggatggttccggagagtggggattgttatctggcatggttcagcccagcagcgcgcgccgcacaaagcgcgacagcgccagcttgggctgcccctgccgggcaatgttgtgtgcgggatcggtgaacagcagccggatcagcgcgtggcgcgccgccatgccggcgttcagggcgatgcccagcaactggccgtcgcggcgcaccacgcggcacgggatccagccggcctgcgccagccacagcgcgccctcggtgccggctggaatggccggcgccagcggcgtggtgacggcaacgccgttgcaggaaagatccctggtggtcacgcggtattccttgccatccacgcgcagcagcgctgccgcgcggtgcgggaagcgctcttccttgcgcgggcgcggcagttccacgcagaccagcagcgaggccaggtacagcatcagcgccaccccggtccagatggtgttgaaggcgagcccttgcgcatcggggtccaccaccagggcgcggcccagtcccagcgcggagaagcccagcagccccgcgtacagtgcagcgaacttgccgtggatcaccagtttggagcggtccagccccttgttggtcaccttgaaaggccgtccgaacggcttgaacatcgcgctcaccagcgatgcggtgacggccagcgccgccacgatctgcgtgacttcggtgaagatcggcagcgcgcgctggccggtgatccagatgctgtacgcccagtacgccaccagcgccggcaggccgtaggcgagaaactgcagcggctcgccatacagggtggagacgccgaggtaccagtacagcagcggccctgccagcagcatcagcgtgaatggccgcgacagccagtgcaacaggccgtgcacgtagtgcagccgctgcatcccggtgtagccgcgcccgcgcagcggcccgtccgcggtcagcgccacctggatcgtgcccagcccccagcggctgcgctggctgatgtactcgggcaggccttcggctgacaggcccacgctcaggcgctcattgagccagcgcgtgatatagccgtgcggcagcagccggtaggtcaggtggatgtcctcggtcaccgtgccggtggggaagccgccgatcaggtcgatcaggtcgcgccgcaccacgaacgaggtgccgatgcagaacgccgcgccccaggcgtccttggccggctgcatcacgtcgaagaaggcgcgttgctcatcgacccagcattcggtggcgcgcaggttgtactggatcggatccgcgttgtaatagaactgaggtgtctgcaccacgcccacgcgcgcatcgctgaacagccccacggtgcgcagcaggatattgcgatgcggcgcgaagtcggcgtccagcaccaggatgtagggcgcgccgccggccgcggcgctgtggcgcaggccgttgttgagattgccggccttggcgtgggcgttgtccgggcgcgtcacgtagtgcgcgccgacccgttcgcagaactcgcgcagccagtcgcggcgggtgtcgtccagcacccagacgcggaagtcgggatagtcgatcgccagcgccgagacaatggtcttctccaaaatgtccaggccttcgttgtaggtggcgatgaagatgtccaccggcggcacctgcttcgcgcggcgcaaggcggcctcgcccgcgtcggcgtcgggggtgtggttgctggtgcgcgccagcaccacgatcgacagcagcgtataggccagcgtcatgcattcgaaggcaaagaacacatgggcccacacgctggcgaagttcatctgccagtcgggcagcgtttcgcggacgcgccaggtcaggtataccgccagcagcaaggcggtgacgccgccgaacagcacgcggtccgccggccggtcttgccggcacagcatcgagagcagcaccatcgccagcagcacgccgccgttgatgaccagcagcgtctggttttccagaaacagggcgaacatcgtcactccttggcggcggtgttgataggggcggttgcaggtgccgcggccgcaatggccggcggcgggcaggacggttccaggcatccgcccggacggaaggggttccagcgcgccgcggccagcacggcccatgcagtggcgcccaggtggggcaggtggaagtagtggaagtcctccgtggtcgaggtgggcccgatcgacagcccggtgctgatgcgcgcctcgggcgtggcgtagagcatcccggacggcgcccgctgcgacagcagcagctgccacagtggctgcgcctgttgcgcctgcccggcggcctgcagcaccagcgcggcctgcccggtgccttcggtccagatgccgtcggggccgcccttgaagccgtagcccgcgccggcgcggtgcttggcctccacccacgccaggttgcggcgccagtcctgcggcgggtccgggatcgcgatcagcggccacagcaccgcatccagcgcggacgggccggcgtttggcgcgcgcccatcgtcgcgtgtgccgatgatgaagcggccctcgcgcgcctgccacatggcgccgacaaagccgcgcgagcgcgccgcgccgtcgcgccagcgcggatcgttgcgctggctggcgagccagctgaaggcggcataggtatcgacgttgtgctcggttgatttccagccctggcgggtctgcttcggctcatggccgaagaagccgccgatatagccggcgggcgcgctcgtgtcgggcacggtggcatgcacccagcccatcagcgcggcggcgccatccaggtagcgcgcatcgcgggtggcctcatgcacggccagcagcagcagcgcggcccaggccacgttaccggtggcagtgccggcctggtaggcatcttcaaaccagcgcttgctgggctcgtcccaccagcctggcaggggcaccgcgccggccggcagcgggccggcgcgataggcgttgcgcaggcgcgcatcgcggaagtggcggtcctggcgggttgcctgcagcacggcgtcggcaatgcggcgcgcttcggcgggacgcttgcaggccaccagcgcgatgccggccagcgcgttgtcgtagacgaaggcggcattgcgcagcgccggggccagcggcccgccgcccggcgccggctcatagctggcgagaaacaaggggccgttgccgctttcacggctgacgcgctcggccagggtcttgcagccgtcggccagcagggtctgctgggcaggctcggcagcgcgcgccgcgcctggcgccagcgcgagcacggcgggaagcagcgcgccggcaaccaggcggggcaggcgtgcagtcgggatcggcagtcgcatccggggctcctttgcctgcgtcggcggttatatcagcgatgcccgcagctggcccagccagctctggttcagcgtcacgcgcgcccagcggcccatgccgcaatggccggactgggttggccctgccgctgcccgtgctgctgcccctgacgccccgccagccttgccgggcacgttgcccagcgggcggtcgagcttggcgatcacatagatctcgttcttctcgatcggcgggaagggcacgaagtaacgcgcctggtcgccgtccggcgcgcgcggcagtacctctgccaccgatgccggcaacgccgtgggcacgccgtcgacattcacgttcagccgtgcaccgggcagcaggttgtcgctgaggctgcgcgggaacaccgcaaccacgcgcgtctgcgcgcagttgctggcgcgcgccagggtggcgccggcggccacgcgcatgccgggctgcgcgatcaggtcttcgatggtgccgggttcggccgagcggatctccaggttcgaaagccggtcgaggcgttcctgttccgtggcgatcatctcgtccaccgacttgccataggcctccagttgttccagctctgccgtcagctgtgccgattccgcgcccagtacctggcgccgctgggccagcgtggcgctggggccgtcggtggatgaggcatagaccttgttgcgcgcggcctcgctcacgctgactgcgttatcgagctcggccttggccgctgccttggcattggaaagcatcgacagctggtagcgcgaggcattggtgtaggcctcgctgacggccccggcccactgcatgttctggttgcggttgaccacttcctgctgctggtcttcctgtgcccgggccgatgccaggcgcgcctccagggcgcgcacgcgcgcaccgtgctcgcgttgcgcagcgctgttgtagcgctgcaggtcctgctcggtggcggccatcagccggcggttgctttccagccgcgcgcgggcggagtcatggcgctgctggttgtcgagcttcttgccggtcaggtcgaccagcagcgaacggtcgatgttcgggttctgcacgatcatcagcgcctggttggccgagaacgactggcccgcggccaccatctgcttcgtcacgatgccttccacgggagaagtcaccaggctgaccggactgttcaccacggcccgctccgacgagcgcgtaaacacatttggaaacatgattgtcagtacggcccagatgatgaacagcaccacgccgtagcccgccatgcgcggcacgatgtgccagagcggcacggtaacgggctgcgggcgttgcaccaggccgtcgccgtggggctggcgcagcggagccggtgtcagcgggtgttgtctgggtggcggattattgcgctggtcggccatggtgttgttctccggcaagcaaagtcaaaaagcgtccccgccggcatgcacagggtgcatgccggatgagcgaaaattccacgcaagcgggtagcgtcgcgcaagggctgtcgcgcggtgcccggcttgcatgtccccaattcagcttgttgtctgcagcacgctcgatgtggccaggccgtatcggcgcgccttgcattcgggccgacaagcggcccctggatttgcccggcttcatccgggcagagttgaacaatggccagtcaatggccaagaagtggcagcccgctgacgcaaagattcatgcactcaggccgccgtgtgtgagttaaaggctagtcagttgccccgtcccttgctgtaaaaatgtgtaaggggaggctgtagcactgcttaacacggcagtaacatgacatgcaatgaacgacgaatacagcacacattgacggggttttgacgctggtacggagttgagtccggcagcgatggcagttggcgcgcgctgcggtgacgcgggctaatcgtcggctgcgagtggcggcgcgatgtgctccagcggccgccgttcggcgtcgatgccgaagcgcaatgccagcagcccggcgacgatcaccagcagcgcgccgaagccgtagcctgccgccacggcttcgcggctgccgctttcaatcagcgcgcccagcagcaccggcgcgataaagccgccggtgccggtgcccacggcgtagaacaccgagatcgccagcgcgcgcatttccagcgggaaaacttcgctggcggtcaggtaggcggagctggccgcggccgaggccaggaagaacaccgccgaccagcacagcgcctggccgcgcgcatcgagccagccttcaacgaaggcccagccggtcagtgccagcccgatgccggacagcacgtaggtggcggcaatcatgcgccggcgcccgatgtggtcgaacaacgggccaagcagcagcggccccagcgcgttgcccaacgcaaagggaaagatatacagcgccacgcgcgcttccggcacggcatagaagcgtgtcagcaccagcgcataagtgaagaagattgcgttgtagaagaaggcctgcgccaccatcagcgccagcgtgatcatgctgcggcggcggaagcgccgcaacagcaggcgcatgacttcgcccacgcccggcgcggcgcgccggcgcatcgccaccgcgacgcaatccggtgccaccggcggcagcgggccatggcgggcgcgcacctcggcctcgatcgcggcgatcacgcgctcggcctcttccagccggccatgggtggcaagccagcgcgggctctccggcacatgcttgcgcaccagcacgatggccacggccagtaccgcgcccagcgcgaagcagacgcgccagccccagaccgggccgaacacgcgcgcatcgagcagcaccaggctcaacccggcgccgagtgccgcgcccagccagaagctgccgttgatggccaggttgacgcgcccgcgcacgcgcgccgggatcagttcgtcgatggcggaattgatggccgcgtattcgccgccgatgccaaggccggtaaaaaagcggcaggccgcaaagaaggcaaagccgggagagaacgcggtggccagcgtcgccaccatgtagaccgcgagcgtggccaggaacagccgcttgcgcccgagccggtcggccatgcgcccgaacaccagcgcccccagcaccgcgccggcgatatagagcgagcctgaccagccgacctgcgtcgcggtcaggcccagcgtatcggggcgctccagcacggcgccgaccgagcccaccagcgtgacttcgaggccatcgaggacccaggcgacgcccagcgcaatcgccacgcgccagtgccagcgcgaccatggcaggcggtccagccgccccggaatgtcggtgcggaatgcggtgtcgacgggaaggctggcgagggcggtatcggttggcattgccaaccagtataggaaacgggtgcaaacgggtgccgcagcgttcagcggtacagcaccgtgggcagccagaggccgatgccggggaagacgtagagcagcaccagcgcaatcagctggatgcccatgaacggcagcatgcccaggaagatctggttcagcgtgacatgcggcggcgccacgcccttcaggtagaacgcggccattgccaccggcggcgacaggaaggcggtctgcaggttcagcgccaccagcagcccgaagaacagcgggtcgatgccgaagttatccagcagcgggataaagatcggcatgaagatgatgatgatctcggtccattccagcggccagccgagcaggaagatgatcagctgcgccaggatcatgaactgcaccggcgacaggttcagcgacagcacccactgctcgaccagcgcctgtccgcccagcagcgcgaacgcggcagagaagatcgacgagcccacgaacagccagcacaccatggcgctggtcttggccgtcagcagcaccgattccttgaccacgcggaagttcagctgccggtacgctgccgccagcagcgcgccgccgagcgagcccaccgccgcggcttcggtcggcgtggccagcccgaacacgatcgagcccagcaccgccaggatcagcagcgccagcgggaagaacgacgacagcagcatcttgaagatttccagccgcgcgaagctgaagcgccagtagaagtacaccagcaccgccgccacggccgccagcgtgatccagaaccagcggggtgcggatactgcagccgccgccggcactggcgctggctgcgccccggcttgcgctgcggtcgtcggtgcaggggtggtagcggcgggagcggccggcgctgcgggcgcagcggattcttccactggcggcgcctgcaggtcgtcgagtgatgcgctgctttcctcggcgcctcccatcgacagcggtgcctccaccgcgacgctggcggcgggcgcggtgaccacgctgtatatcgttcccatcaccaataccacggcgatcgccggcagcagcacgatgcccagctggcgcgcgaacactgccgtcggcaggtcggcattgcgcgggcccttgagcgcgcgcatcaggccggcaccgagcgcaggcaaggcatgggtggcgccgcgggcttccagcgtgcgcgccaccggcggcagcggcaccacccgctcggcttccggcagcggcggcgcgagcgcgggcttgagcttggccaggatcaggaggtagaggatatagagcccggtcagcatcaggcccgggaagaacgcgcccgcatagagctgcaccaccgacacgcccgcggtggcgccgtagacgatcagcagcaccgacggcgggatcaggatgcccaggcaaccgcccgcggtgaccgcgccggccgacagcgacgtgctgtagcccgcgcgcagcatggcggggaaggccagcaggcccatcagcgtgaccacggcgccgacgatgccggtggcggtcgcgaagatcgcgcaggtcaccagcgtggccaccgcgagcgagccgggaatccacgccagcgcaaggtgcaggctgcggaagagcttttcgatcaggttggagcgctcgaccaggtagcccatgaacacgaacagcgggatcgagatcagcacgtcgttggtcatgacggcataggcccgctgcaccatcaggtccagcgtctgctgcaccgcgatcgtggggtcggcgtggcggtaggccagccaggagaacagcacgcccatgcccatcagcgtgaacgcggtggggaagcccagcatgatcgccaccacgatcagcgccagcatcaacaggccgaggtgtccgttggtccagtccgccggcgcgggcatgaaccacgccacggcgccgacgatcagcaccatcagggaaatgccgaaccacagttctttcctcatcggccggctccaggctggtcgtcgcgcggcggcggtgactcggccagctcagcggtaggggtgccttgcaccatctccttgagctgctcgacatcgacttcctcgacatcgccttcgcgcggcggccagctgccgttcgccaggcacaggatgcagcggatggtctcggccgcgccctgcagcaaaagcagcgcgccggccacgggaatcactgccttgaacggatagatcggcggaccgtcggcggcgatggaagagtgttcgtcctgtgccagcgagacctcgaagaaatcgatgcccgcccaggccagcgcgatcacaccggggaagaagaaggccaggtagagcaccaggtcgattgacgcctgcatccgcggcggcaggaagccatagaggatgtcgccgcgcacgtggccgcgcttggccagggtatacgcgccggccagcatgaacatcgtgccgtacagcatattgctggcatcgaacacccaggcgtgcggcgtgcccagcgcatagcgcgagaacacctcgtagctgatcatcagcgtgagcccgatgatcagccacgcgccggcctggccgacgaaggtgctgatgcggtcgatgccaagcagcaggcgttgcacggtatggcccccggagtggcgcggctcaggtgcgtttggagaagtagtggctcgttgccagccggaaatcgacgttagtgtcgttctgccagcgcgtggcgcgctcggcgaaggccttcatcgaatcattgaccttcttgaacatcgggttttccttttccttgcgcgccacgatctcatcccataccttcaactgcgcctgcagcaccgagttgggggtcgcgtagaacttcacgccttgcttctgcagcgcctggtagtccttggaatagcggtcgatcgccttgatcgacatatccgcggacgccgcttccaccgcgttggcgatcagcgccttgagcttggccggcagcgcgtcatagcgcttgcggttgaacaggatctcgaactgctccgagggctggtggaagctgcgcagcatgcagaccttggacacgtcctggaagcccagcgcgcggtcggagctggcgttgttgaactcggccgcatcgagcagcccgcggtccatcgccggcacgatctccgcgcccggcagcgcgttcaccgcggcgcccaggccggtgaagatgtcgatcgacagccccaccgtgcggaacttcagccccttgaagtcttccggcttggtgatgggcttcttgaaccagcccagcggctgggtcggcatcgggccatacaggaacgacaccacgtccaggttgaggctgcggtagatctcctgctgcaactccttgccgccgccgtacttgtgccaggccagcagcatgttcgggtccatgccccaggccgggcccgagccccacagcgccagcgccgagttcttgccataccagtacgcgatcacgccatggccgccgtccagcgtgcccttgctgaccgcgtcgatcaggtcgaaggccttgaccaccgcgcccgcgggcagcagctcgatcttcaggtcgccgcccgacatattgttcaccttggtgacgaagtcgccggcgaactcgtggaagatgtccttggtgggccaggtgctctgccagcgcatcgtgaccgggccttgcgccttgacgatggccgggaagcccattgccgcggcgccagcggccgcaccggcggcccccccaaggaagccgcgccgggaaacgcctggcttggtttccgcttcaggttttgctgcgcctgctttccttgtcctggatgccatgaccgcctccatttgctatgtgtgggattacccgcgagcgccgaccatgggggccgagacaactcgccactgacgcgaacatcggaaaagtcgggaaatctgaagcatgccgggccagtggccgcgcggcagaagcgggcgtgcaggtggcccgtgattcccttcatggtaggaaagggacagggaaccacaatctagggattacccgcgcggtgtgggcccgcgcacttcgtggcggggcccgccgatgccgcggatccggggctgggcgctcaggtgcgggtgatgccgaccgtgaactcggcctccagcagccccgctgcatcggcagcctggcgcacgcgcatctggttcgggtggggtcccgcgatcgggtcctgcgtggtggcgcgcgacggcacgccgtgcgcgcggtaggccgggtggctgcccagcacctcgcggttcagggtatcgctgaagtacagctggctggtcagggcttccgaccgccccagcagcaccttgaagtggatatggatggcgcgtggcgcgtaccagccgggatagatcgacgtgaacgtggccacgccgtcctggctggtgggctggacgccacgcaggaaacgcgcctggcggttgccgcggccctcgccgctgtagctgccgtcggcatcgcagtgccagatgctgaccagcgcacccggcaccggcgcgcagccgcgcccggcatccaccacccggatgcacagccgcaagggttggccagggcggtcgtcgcggatgtcggtgcgcaccagggcgtcgtcgaggtagaaggggccttcggtggcggcgggcgtcagcaggcaggcggcgggggtggctgctgccgccgcgggcgcgatgccggcagcggcaagcaggccgcccaactcatgcaggaagcggcggcgcgccgcgtcggtggctgccgcgctgtcggcgccaattgccgggcgcactgtcatggtgggctccgaggtgatccgggtgcgccttgcggcgcgtggtgctgccgcgccggcgccgagacgtcagcgtcccatcgccttgagcatcgagtagccgtggctggtaatgcgcggctcctgccggcggccgtgcaggatctcaagttgtacgagttgcttttcgaccagtgccttcaggtcgatggggtcgatctggcgggaatcgctggaatcgagagaatcggggccgtcgctcagcaatagcagcgtggcaaattcatgcgggctcagcacgttcgtctccttggctagaggggggcgtttgctgggagtctgcgcggcgcagcagcgccaaacgcgggaagattgtcagaagccctggagacgatgcggcacatgccgcccatgcgtgctgcgccgcggtgaaatgctgcggcgcggcatcctgtctccggcgactaattggtttgacgaggccggcagcacgcggttccgtgcaaccgctcgcggttacatgtgaccgggcgtcgcacgccgtgatcgtcatccgccgctcattatcagcctgtcacgatgacaatgtgatggccatgccggtactgtggaattgggcggcagcctaccgcccattgcaccgcttgcgccgcatcgcggcgtctatcggtcctgctgctcgcgccacgcctcgtacaggtcgatgccctcgtcgcgcgccggtacataggccagcgtcatctcccgttgctccagcggccgggccagctcgatataaccgcgctccgcggacaggtcgtagggttcgccgtcttcattggagtaggcgtagtagaccgccttcacgccggccagatacattgccgacaggcacatcgagcaggggtagccgctggcgtacaccgtgcagccgctcaggtccggcttgcccagtgcccggctggcggcgcgcacggcctgcatttcggcgtgtgcactcgggtcgcaggtggcgtctacctggttgaccgcgcgggccagcacctcgccgtccctgacgaccacggcgccaaagggccaggtattgcgttcgcgcacgttctccatggcgaggcggatggaatcaagcagataggcttctgtcgtggacacgcgttgtctcccttgaggcctggcccgtgcaggcggacgatggttcgggcctcgggactataggccagcgtgcacgggcatggtggcgtgggttgttatagggcatatttgggccttgcgcgtgcagcaccggttattggcgatggcactggcgtgcattcgaatccataacttcgcgcggcgtggctggcatgacagaatgcaccggaccgcatcgacaccccttacacccgaggcatccgcacggaggaaagaacatgctggtggcgcgcctgtccatctgccttgccctggtcattgccatgctgatatccaccccagccgccgccgccggcggcccgcccgaacaacagttgcgcgaggccgcggccagcggcaacgccgcgcaggtcaccgcactgcttggccagggcgccagcatcgatgaccgcgatgcgcagggacgcacggcgctgctgctggccacgcaccacaaccgcgtgcaggcggccagggtcctggtcgatgccggcgccgacgtgaacgcgaaagatgccatccacgacagcccctacctgtacgccggcgcgcgcggctacaacgaaatcctgcgcctgacgctggcccatggcgcggacctgcgcagcaccaaccgctacggcggcaccgcgctgattcccgccgccgagcgcggccatgtcgagaccgtgcgcacgctgatcgcggccggcgtggcggtgaaccatgtcaacaagctcaagtggacggccctgctggaggccatcatccttggcaacggcgggcaggcccataccgagatcgtgcgcctgctggtcaaggcgggcgccgacgtgaacctggccgacggcgacggcgtgtcgccgctgcagcatgcgcgccagcgcggctatacgcagatcgaacagattctcagcgccgccggcgcacgctgaaccctgcgccgcaaggcggctcgctctcgcctgcctcatatatactgtcagtgtgcatacaaaatggtgagagcgatgtctgcgagagcaaaacgcaacgcaacgagtggcagtcatgaggtggcggatgccatgccggaagccgatccggcaaaggaattgctctgggcccgcccggggttcctggtgcggcgcttgcaccagatccacgtcgcgatgttcttcgaggagtgcaagtcgcccaatatcacgcccgtgcaatatgccatcctgacggtgctgtcggtgctgccgggattggaccagacttcgctcgggcaggaggtcggcctggaccggaccacgaccgccgacgtcgtgcgccggctcgaggagcgcgggctggtagagcgccgcgacaaccccgccgaccggcgcacccgccacgtccacctgacgcgggaaggcaagagcgtggtcacggcgctgcgtggcgacatggcgcgtgcgcaggagcgcatgctggcgccgctgaagcccgcccagcgcgaagtgttcatggacctgctggcgacgctggtggaagccaacaaccagtacagccgcaccgtgctgcgcagcatgtgagcccggcggcgggcgcaaggcccgccgcgcccccaacgcgcgctagaccgggtagaccaggtcgttggcgatgatggtggtgtcgtagacaacctgccgctcgcgcagcagcaggctgccaccctggcggcggaagcggtcgtagtaggtccccgccaggtggatcgtggtggggccctccaccagtgtctgcagcagcatgtagttggcctgtgccacgatatcgccgtccgcggtttcgtcgctgacccgcgtgttggtcaccaggtgcaggttgtagcgcggcgcgaacatctgggtattggcaatcgcagcggcgcggtcgcgcatcatgcccaccccttcggcgtagaccagccccaccggcaggttgcgctcggcattctcgcgcgcggtgatccggtagagcgcatcctcggtgaagaagcggggccattgctccaccaggccggcgtcgagcaccgcgcagtattccgcgtggaaggcctcgatctccagtcgcagttcaatggcgcgcgcggtgccgagggcgctctcgcgatagagggaatagttcatcggtttcatattctgggaatcccgttagccgccgttcagaaccccatcacgccgcggtagtactggtacatcgcacggatggcggattcggagatcagggagttggaggtgccgacctggtccgggtccagcttgagcacattgaggtcgctgctggagcggcgcacgccttcctgcacgaacttcatcgcctcgttgtcttccagccccaggaagccagcggggcccatcaggttgccttggcgcaggcggtgctgcgtcatctcctcggtatcatcctcgtagccgaacatggtccacagcatcagcatgctgtccggcccgttgggcacgatctggcgcacgccgagggtgttcatttcgcgctgcacgatcaggttcggccagatcgtctgcatcgtcaccgaccaaggcgaatcgaactctttcacatattccaggaagcgttcgtcctccagacgcatgccttcatggtatgagcgcatctccttcttgttctcgtcgctgacggccgcgtacttgtcttccttcttcgccgacgccatggtgccgtgccgcccgtgcacgggatcggcgatcatggcgctttcgttgcccgccaccagcagtccgaacaccaccaggaaggagtgcagcaacgtggcgtggtacgggtccttgaggttctcgtggtacatcttccagttgcacggaagttcgttcttgtagtacccgagcaccttgagcggcttgccgttgaagacgatgtcgaagtccttgaggatctccggcgtcaggtagtcttccaggctttccatgtccgccgcgtacgaggcgaagatcacgccgttgcgcgtggccacgttcagcttgaccaggccgtggtcctcgttgcggaagtccctgggcatgccacccgcgcgattgacgccgcgcttgaacggaacgccctgcaggttgcccttgaggtcgtaggaccactggtgataggggcagacgaattcctttgcattgccctggctgtggcggcagaactcggcgccgcggtgcgcgcagcgattttcgaagacgttgaccgagccgtcttcggcgcgcgacaccaccaccggcgtcgcgccgacataggagcgcttgtagtcgccggcgttggggatctccgcttcgagcgcgacgtagttccaggagcgtccgcgaaagatcttctgcagctcgaggtcatgcacctccttgctggtgtagacccagtccgggatgtagtgcaggctgtcttcgggccaacggcagtcggccaggccggcgtctttcttgcccagcgtgtgctggatcacagcttgtgtctggtacatgtgggagtcctttcagagtgtagtggggctggccgctgccgtagggaggtcgcgcaccagctgtcgcagcggcatggcgtcatcgcacagccgtggcagcaggtcttcgacggcatggccgaagagcgcgcgcagcggccgcaggtcgccgccggcattgatggcgatggcgtggctgagccggccgtgccgggtgccgagcagcatgaacctggggcagggcgcgtcgctggcggcgatgccgcgccaggcatagcgggtatcgggagtggccgcgccgagcatctgcacgttgcagccgaactggtcggtccagaaccacggcatcgccgcgggttcggtctgcacgcccagcatggcggcggcggcgatgcgcgcctgctcgttggcgctttgccaggactccagccgcatgtgggcgccgagccggggctggtactggctgcagcagtcgcccgcggcatagatgccggccgcgctggtgcggccctgctggtcgacctggatgccgccgttggcggggtccagcgccaggccggcggcggcgccgagcgccacctcgggcgtcagcccgatcgcgaccaccaccagcggcgcctgcaacgccgcgccgtccgcaagcctgacctgcacgccatcggcctgcggcaccagggccgcgatgccgcagccgagccgcagctcgacgccttgcgcaagcacgcgctgcgccagccagctgccaagctcaggcggcagcgcgcggccgagcagccggtcggcgctttcgatcagcgtgacccggaggccgaggccggccgcggtcgaggccgtttccaggccaaggaagccgccgccgatcacgatcacttcgcgcgcgcgctgcatggcatcgcgcaggcgggcggcgtcgtcgagcgtgcgcaggtagtgcacgcggggcgtgcccgggggaagcgtaggcaggacgcgcgcattgccgcctgtggcgagcaggcaggcggcgtagcgaatggcctcgccatcggcgcagtgcgccacgctgtgcgcggggtccagcgcggtgaccgtggtgccaagccgcagctcgatctcctgcccggcatagaagccggcggggtgcacgccgatcttgccgtcctgcgcggcatcggcgagcacggacttggacagcggcgggcgttcgtacggtgcatggcgttcgccgccggccatgacgatgcggccgcgatggccgagcctgcgcagttcggcagcggccatcgcgcctgcctggccggcgccgacaatcaggatgggcgtgtcttgtggcatgctcggctccttcaaagctcgacccacacccggctgtcttcgaacttgaccgggtaggtgcggatgtcgctggtggcaggcgcgcacatcgccttgccggagcggatgtcgaagcgggcctggtgcagcgggcactcgatgcagccgtcttccaggtagccgtcggacagcagcgcgtactggtgcgtgcagacgttgtcggtgacgaagtactggtcgtcgctgcgatagacggcgagctggcggtcccccagcgtgagcggcattacctcgtcgttccgcaggccgtgggcggcgtcgatttcaatccatgccatggcgatctccgtgaatttgatttgtcagtatgctgaatatataagatcagtgtactgatgttttatgctcgcagtattctggttaaccctggcccgggttggccgcgccggatccggctggccccaccgcgggcgcgccggcctgcagcgacgggcgggcctgccagcgcgccaggatctcgcccatgatgccgcggcggaacgtcagcacgcacaccacgaagatcagccccgtcaccatgctgaccgattcgcccagcgtttcgaaccagccgatgccggtcatggccgcgagcgcattgccggcgtcgcccagcttgttttccagcgccacgatcaccagcgcgccgaccagcgggcccgacaacgtgcccatgccgccgaccagcgtcatcaggatgaccgtgcccgacatcatccagtgcacgtcggtgagcgtggcaaagcccagcaccagggtcttgagcgcgcccgccagcccggccagcgccgacgacagcacgaacgccagcagcttgaagcggtccgcgtcatagcccagcgagatggcacgcggctcgttctccttaatcgcacgcaggatctgcccgaacggcgagttgacgatgcgcatgatgccgaggaaggccgcggcggtgatcagcagcacgacgtagtacatggtgtggtccgacgccagcggcagcacgccgaacaggtcgccccgcggcaccgcctggaggccgtcttcgccaccggtcgcgggcgcctgcaggcagaagaaatagaacatctgcgccagcgctagcgtgatcatggcgaagtaaatgccctgcctgcgtattgccagtgcaccaaacaccaggccgagcagggcaccgaacgcggtgcctgcgagcaggccaagctccggcgtcagctgcaggaacttcatcgcatagccgcaggcataggcggcgccgccgaagaaggccgcatggccgaacgacaccagcccggtgtagcccagcagcaggttgaaggcgcaggcaaagagcgcgaagcacagcagcttcatcaccagcaccgggtaggcgcccagccagggcgcgagcagcaggaccgccagcagcagtccgtaggcgaaggtcgcacgctttccgcttgccatcatttttcctttccaaagagcccggcggggcgcaccagcagcacgcacaccatggcgacgaagaccaccgtcgcggaggcttcggggtagtagaccttggtaataccctcgaagacacccaggccaagtccggtgaagatcgagcccaggatcgaccccatgccgccgatcaccaccacggcgaagaccgtgatgatcagattctggcccatcagcggcgagacctgcatcaccggcgcggccagcacgcccgccagcgcggccaggcccacgccgaacgcgtaggtcagcgtcaccagcagcggcacgttgacgccgaaggcctcgaccatgcgcggattctcggtgccggcgcgcaggtaggcgcccagccgcgtcttctcgatcatgaaccaggtggcaaagcacaccgccagcgacgccagcaccacccatgcgcggtagttgggaagcaccatgaagcccagctggctcacgccagacaagccttcaggcgtgggatagggcaggcctgagacgccatagatcgagcgcagcgcgccttcgatcagcaggcagatgcccagcgtcagcagcagcccgtacaggtggtcgaagcggtagaggtggcgcagcatggtgcgctccagcaccacgccgagcgccccggccagcaccggtgccagcaccagcatcagccagtagttgagcccgagatagttcaggcccatccaggccagcaccgcgccgagcatgaacagcgcgccgtgcgcaaagttgatcacgttgagcagaccgaagatcacggccaggcccaggctcaggatcgcgtagaacgagccgttgaccagccccagcagtaactggctcagcagcgcgggcaggggcactccaaacaattccatgaaagtctccttaaacgcccagcaaggcgctgagcgtgggcatctttcgttcgagctcatcggcgccgaaggcctcgacgatgcggccgtgctccatcacgaagaagcggtccgccagcggcgcggcaaagcggaagttctgctctaccatgacgatggtgtagccgcggccgcgcagcatggcgatcatcttcgccagcttttgcacgatcacgggcgccaggccttccgagatctcgtcgagcagcagcacgctggcgccagtgcgcaggatgcgggccaccgccagcatctgctgctcgccgcccgacatgcgcgtgccctggctcttgcgccgctcgtgcaggttggggaacatctcgtagatctcgcccagcgtcatgggctcgcgcagtccgaccgcccccggggtgcaggcgaattgcggcggcagcagcaggttctcctcgcaggacaggctggcgaagatggcgcgctcttccgggcagtagcccaggcccagcggtgcgatgcggtgcgtcttcatgccgatggtttcctggccgtgcacacgcaccgaacccttgcgcatgccgaccaggcccatgatggcgcgcagcgtggtggtgcgtccggcgccgttgcggccgagcagcgtcaccacctcgcccgggttgacggtcaggtccacgccgtgaaggatgtgcgactcgccataccaggcgtgcaggccgcggagttcgagggcaggggaggccgtccttgtcatgatgcctccgcgttcagcgccgccgcggctgcgtggcggtcttcgggttcgtcggtggttcccatataggcttcccttacctgcggattgcgtgagatctcgtcataggtcccttctgccagcaccgcgccgcgctgcagcaccgtgatgcggtccacgatggacgacaccacgctcatgttgtgttccaccatcagcaccgtccgccccgccgaaacgcgcttgatcagggtggtgacggtctccacgtcttcatgccccatgccttgcgtcggttcgtccagcagcatcagctccgggtcggtcgcgagcgtggtggcgagttccagcgcgcgcttgcgcccgtaggccagctccgccgtgcccaggtgcgcgaagccggccaggccgaccgcatccagcagttccatggcgcggccgtccagccgcgacagggagcgcctgccacgccagaaatgccaggaggtcccgagccggcgctgcagcgcgatgcgcacgttctccagcaccgtcagttgcggaaacaccgccgagatctggaacgagcggatcacccccatgcgggcgatctgggccggccgcagcgcggtgatgtcggtgccgttgaagtggatcgagcctgacgagggcgcatggaacttcgtcagcaggttgaagcaggtggtcttgccggcgccgttggggccgatcagcgcgtggatcgagccccgccgcacggacaggctgacatcgctgactgcggtaaagcccttgaacgccttggtcagtccctgcgtctgcaggattacatcagtgtcaggcatggcgcgctcacttcttcaccaggggacattcgctggcggacagcggccggaaggcttcgtcgccggggatcgtgccgatgtacctgaccaggtcccacgggcccttggactcggccggggtcttggcctgggccaggtacatgtcatgcaccatgcggccgtcgacacgcaccttgccattgcgcacgaaggcatcgttgacgggcagcgcgcgcatcttctccgccacggccgggccttccacggtcttggcggcttccaccgccttcaggtaatgcagcacgcctgaatagacgccgatctggccatgcgtgggataggccttgtggcgcttgtagtagcgctcgacgaagtccttcgacttgccatccaggtcgagcttgaacgggtcgacataggtcagcccttgcgcagcgttcaggcccaggctcttgatatcggtgatgaaggtggagggcgtgatcaccgtctggcccgccttgatcaggccgaactcgccggctgccttgaccccgttgatcatgtcgttgccggcgttggccagcaccaccaccttggccttggaagccgaggcggccaccaccgggctgctgaaatcgctggcgttgagcggatgccgggtggcgcccacgttcttgccgccgcctgcgtccacggccttgcggaaatctgcctccagcgactggccgaaggcgtagtccacggtgatgtagtaccagctgttgcggccctgttcgatcatgcgccgcaccagcgggtaagacaccgaatacgtgtcccaggcccaatggaagccggtgggcgagcagttctggttggtcagcgccatggcgccgccggtcgagacgatgtcgatcttctgcttctgccgcgccacctcctgcaccgccagcgcggtcgacgagttgggaaagtcgatcaccatgtcgacgccatcggtatcgaaccagcggcgcgccagcgacgaggcgatatcggccttgttctggtgatcggcggaaagcaccgtcacaggtttgccgagggccttgccgccgaactcttccacggccatctgcgcggcaagcacggagcccttgccggagaggtcggcataggagccggacatgtcggtgatgacgccgatcttcacgccattggcgtcggccagtgcgggcgtggcggcggccaggcccagcagggcggaggacgcagcgagggtgcggaggatgcgagaggtggacatcaggggctccaggttgtctacgcgaaagattggaatggttgctgcgtcggcagaccgcggcgccatcgctgcgccgcgggtagcgcggataaactcagtatactgaatagtttgccggaagaaagggcggagagatccgcccttcagcttcacccgtagtgccgctcaggtggccagatcgcggccgcgcgtctccggcacgaacagcatgccgatgacaaaggccagaccggcgatgatcaccgggtaccacaggccgaagtagacgtcgccgctggccacgttcatggccgtgaccacgaaggacagcatgccgccgacccagcccgcgccgaggtggaagggcagcgacagcgaggtgtagcgcacccgggccgggaacagctccaccatgaaggccgccatcggcccgtacaccatggccaggaacaggatcgggaccagcagcagcacgaataccatcggcgtgttgatcttggcggggtccgcgcgctcgggccagccggccgccaccagcgcgctcttgatggcgtcgcggtcaaagccctgcagcgtgcgatccgcgatgcgtacttcagcctgcgccggattgctggccggcacgaaggtgtagcccacgcccaggtcggtcaggtagccgcggatcttgtcgcaggcggacaccggctcgccgaacaggcgcgccttgcagtcgccggccgtcacctgcacggcgccctgctgctggaactgttccagcgccggattggcatagtgcgtcaggcccttgaacaccggctggatgcacaccgccgccagcaggcaggcggccatcatgatgtacttgcggccgatgcggtcggacagccagccgaacagcaggtagcagggggtggccaccaccagcgcgatcccgatcagcatgtggaccgtttcgagcggcacgtgcagcgtcttgttgaggaagaacatcgaatagaagtggccggtgccgaagatggcgcccaggcccgccgccaccacgaacagcagcagcaccgacctgaggttcttccagttggtgaaactctcgcggatcggcgccctcgaggtggtgttggcagccttcatccgggcaaagaccggcgattcatgcagcttgccgcggatgtagaccgagatcaccagcatcacaagcgacacgatgaagggaatgcgccagccccagtcacggaactcggcctcggtcaggaaggtcttgagcaggtagacgaccagcaacgaggacagcaggcccagcgttgccgtggtctgcagcgaactggtgtacagcccgcgcttgtgcacgggggagtgctcggccacgtaggtgaccgcgccgccgacctcgccgcccagcgccaggccttgcagcagccgcagcaacaccagcagcacggtggcggtgatgccgatctgctcatacgtgggcagcacgccgacgccgacggtggcaacacccatcagcaggatggtgaccaggaaggtgtacttgcgcccgatcaggtcgcccaggcggccgaacagcagcgcgcccaccggccgtatcaggaagcctgcgccgaaggtggccaggctggccaggaaggcggcagtctcattgcccttggggaagaacagtgcgccgaaatacaccgccagtgcggcgtagatgtaaaagtcgtaccactccatcagggcgccgaaggaagaggcaaggatgaccttgcgctcctcggctgtcatgccggatgcgggggcgcgtgtctcgctgcgagtcaggctgatcgtcatggcgggggtcctttggtctagctattgtctctatatgtctgctcgtcccggcggtgccggcgccgctggccagggcctgtcggtccctcgcgcagtgcagcgccgcatccttccggtgcatcagtcagtatgctgatgagaaacgcagtatgctgagcaaaatgcgggccagtccacaatgtgccggaatgcccgaaatcgcctatttaaatggccttttaatatcgtcagcatactgagcatctgggctcagtgtactgagcacctatggtcatcgttataggtgttaaccctccgcgccgtttctagacttttggaaattcgctgactagaatccgaaactaatcagtgtactgatcaattgcatcggtgcacgccgcatgccatgcagcacacgcccgcagcgaagcgatttcaccaatcaggagcccccaccagcatgaccaaagtgaagaagatcgccctcgaagagcatttcatgacgccgggatttcaggcctattccaaggcgttcacgcagcatattgatccggcggtgtttgccgagctgggccgccgcctcgccgatttcgacgaggaccgccttgccgagatggaccgcgccggcatcgacatcacggtgctgtcgcagacgggtccgggcgtgcagggcgagcgcgatgccggcctcgccgtggcgcgggcgcgcgagagcaatgacttcctggccgcgcagatcgcgcgccaccccacgcgctttgccggctttgccgcgctgcccatgcacgacccggaacaggccgcgcgcgagctggaacgcgccgtgcgcgagcttggcttcaagggctcgctggtgaacggccatacccacgggcgctactacgacgacccggcatacgatgctttctgggagcgcatgcaggcgctggacgtgcccatgtacctgcacccgaccgacgcgctggttcagccgcaggtcctggcgggccaccccgagctgaccggcgcggcgtggggctggggcgtcgagaccgcatcgcatgcgctgcggctgctgttcggcggcgtgttcgaccgcttcccgcgcctgaagctcatcctcggccatatgggcgagggcctgccgtaccagcgctggcgcttcgacagccgctttgcggtctattcgcacggcgtccggctggagcgctcaccttcggaatacatcggcaccaatatcgtcatcaccacttcgggggtgtgttcgcacggtgcgctggccggtgccattgccgagctcggcgctgaggccgtgatgttctcggtcgactatccctacgaatccaccgaagtcgcggcgaagttcatcgaggacgcgccgctcgacgacaccatgcgcgcgctggtctgccacggcaacgcgcaacgcctgctcaagctgtaaccgtacaacccgaggaccctcatgcaaaaagtctttcgcatcggccagatcgttcccagctcgaacacgaccatggaaaccgagattcccgcgatgctgctggcgcgccagcagatccgtccggagcgcttcaccttccactccagccgcatgcgcatgaagaaggtggtcaaggaagagctggccgccatggatgccgaatccgaccgctgcgcggtggaacttagcgacgcccgcgtcgacgtgctcggctacgcctgcctggtcgccatcatggccatgggccacggctatcaccgcaagtcggagcagcgcctgaaggtccacaccatcgagaatggcggcgacgcgccggtgatcaccagcgccggtgcgctggtggatgcgctgcgcgtgatcggcgcgcgccgcatcgccgtggtcgcgccatacttgaagccgttgaccgagcttgtggtggattacatccgcaacgaaggctatgaggtggtggactaccgtgcgctggagattccggacaaccttgaggtcggccgccacgatccggcgcggctgccgggcatcgtgtcgcagatgaacctggcggatgtcgatgccatcgtgctgtcggcctgcgtgcagatgccgtcgctgccggcagtggcaaaggtagaggcgatgacgggtaagccggtcatcaccgcggccattgccacgacctacgccatgctcaaggcgctggacctggagccggtcgtgccgggcgccggcgcgctgctgtcgggcgcctactgagggcttgccatgaccaccttcctttatggcgggcatgtccatgccaacggcattcgccagcacttcctgcgctatggtggaaacgacggtgaacgcgccgcgcgcgatcccgtgatcatcgtgccgggcatcaccagcccggcaatcacctggggcttcgtcggcgagcgctttggcgccagcttcgatacctatgtgctggatgtgcgcgggcgtggcctgtcgtcggccgaggccgggatggactacagcctcgacgcccaggcccgcgacgtggtggcctttgccgaggcacttggcctgcgccgccacagcgtggttggccattcgatgggcgcgcgcatcggcgtgcgcgccgcggcgggccggcctggcggcctggccagactggtgctggtcgacccgccggtgtcggggcccgggcgccgcgcgtatcctgcgcaactgccgtggtatgtggattccatccgcctgtcgcgccagggcaccgacgtggaaggcatgcgccgcttctgcccgacctggaccgacgagcagctgcgcctgcgcgccgaatggctgcatacctgcaacgaagacgccgtggtgcgcagctttgaggatttccatcgcgacgacatccatgcggatctgccccgggtcaaggtgccgacgctgctgatgaccgccgggcgtggcgacgtggtgcgcgctgaagacgtggcggagatccgcacgctgctgccgggggtgctggtcagccacgttgccggggccggccacatgatcccgtgggatgacgaagcgggcttttacgcggcgtttggggatttcctcggcgcgccgctgacgcaatgacaagcaaggaggcgacatgccggtaagtgaccaccagatgatcgaggcctggcgcaaggtgctgaagctgtcgcggctggagccggggcagaccgtcaccatcctgaccagcgccgcgacccacccgcagacgctctccaccgcgctgatcgccacgcaggcgatgggtgccatcgtcaaccggctcgacctgccgcccgtcaacggcgaaaaggcgctgagccgcgacgcgctggcctacctgggcacgaccccgctcacgggcaaccgggccgcgattgccgcgctcagggaaagcgacctggtgctggacctgatgacgctgctgttctcccccgaacagcacgacatcctgaagggcggcaccaaaatcctgctggccgccgagccgcccgaggtgctgacgcgcctggtgccttgcgaggccgaccgcgagcgcgtcaaggccgcctccgagcggctggcccgcgccaaggagatgcatgtggtgtcgccggccggcaccgacctgcgctgcccgctgggcgagttcccggccatcagcgagtatggctttgtcgacgagcccgggcgctgggaccactggcccagcggcttcgcgctgacctggcccaacgagggcgctgccaatggcaccatcgtgctggagcgcggcgacatcctgctgccgcagaagacctacgtcaccgagccggtcatgctgacggtggagggcggctttgccacgcgcatcgaaggcggcctgcacgccgaactgctgagcgagtacatggcctccttcaacgacccgcaggcctatgccatctcgcatatcggctgggggctgcagccgcgcgcgcactggtccacgctggggctgtacgatcgcgaggccaccatcggcatggacgcgcgcgcgttcgagggcaacttcctgttctcgctcggccccaataacgaagccggcggcagccgcaccacggcctgccatatcgatattcccgtgcgcaactgcaccgtgcgcctggacggcgtggatgtggtgagccgcggcaaggtcatggacgggttccgctacccggaggagaagtagccatgcacaaggagatcggcgcgtaccagcgccagggcttcggcaacgacctggaactggcgggcccgttcgggctgctgctggtcgatttcgtcaacggctttgccgacccggaggtgttcggcggcggcaatatccgcgaggccatcgccaacaccgtgccgctgctggccgtggcacggcgcgaaggctgggcgattgcgcacagccgcatcgtctttgcggacgatggttcggaccacaacatcttttccatgaaggtgccgaacatgctgtcgctgaaggagcgcgaacgcaacagcgccatcgtcgaagaactggcgccgcgggtgggcgagctggtggtgcgcaagaccgtgccgtcggcgttcttcggtacgtcgctggccgcctggctgacgcagcgcggcgtgcgcacgctggtggtggccggcgcggtgaccagcggctgcgtgcgcgccagcgtggtggacgccatgcagtacggcttgcggccgctggtgctgtcggattgcgtcggcgaccgcgcgcttggaccgcaccaggccaacctgttcgacatggagcagaaatatgcgacggtcaccacgcgcgcggaagggctggcggccatcggggtgcgcgaatgagcgcttgcatgaatcatcgggacggataaaacaatgacatcgtcgatggaaccggatcattcggaaggagggtgcggccagggcgtgggagcccgggtggcgcgcaaggaagacgccaggcacctgcacggcaagggccgctttgtcgcggacatcgccatgccggacctgcaggaggtggccttcctgcgcagccccgtggcgcatgccaggctgttgtccgtgaccaagcccgcgcgccacgcgcaagcggtgatcgtgcgcgaggacatggcggcggcgcgggacatcgtcgcggattcggcgttcccgtcctaccagccgtcggctcaggcgccgctggccagcggcaaggtgcgctttgtcggcgagcccgttgccatggcctttgcccccacgcgcgccgaagccgaggacatcgccgagcaggtggtggccgagttcgacgagctgcccgcgctgaccgacgtggcgcaggcccgccagctcgctggcgaggtgcgcgtgcacgaacactggcgcgataacaccttcctgacgctgaatatcgacaagaacttcgaggcgcgccagcgcgaggcctccgtcgtcgttcaccgcaaggtcaacctggcgcgccagtgcatggtgccgatggagggcaaggcggtgctggcctactgggaccaccagttcgaccagctggtggtgtacagcgccacccaggtgccgcatatgatccggaccatcctgagccattgcctggacctggaccaggcgcgcgtgcgcgtgatctcgccggacgttggcggcgcctttggctacaaatgcgtgctgcagcaggaagagctctgtatcgcctggctggcgctgacctacaagcggccgttccgctttatcgaggatcggcgcgagcacctgaccgccggcgccaactcgcgcgagcatcactacgagcttaccgcctatgccgacaagcgcggccgcctgctggcgctggacgcgaacattgccatcgacggcggtgcctattcggtctggccattcaccatcgggctggagccggggcaggcgatcggcaacctgcccggtccctatgccttcgacggataccgctgcgagactacctgcgtggccaccaacaagccgggtttcgtgccgtatcgcggtgtggcccggaccggcgtctgtttcgccatggagctgatgatcgacgcgatcgcgcgcgaggtgggacgcgagccgtgggaagtgcgcgttgaaaacctggtgccgccgcagtccatgccttacgtcaacgtgaccaacaagcacttcgacggcggcgactacccggccagcgtgcgccaggcgatggagatgatcgacctgcccgcgatccgcgcgcggcagcaggcgggtccgcagggcagccgctatgtcggcgtgggctttggcacctacaccgagcagtcggcgcacggcacttccgtgttcgcggcctggggcacgccggtgatccccggcttcgactcggcgacggtgcgcatcacgccggacggcgggctggaggtgcgcgtcggcgtgcactcgcacgggcagggcatggagactaccttcgcgcagattgcccacgagatcctgggcatcgacatcggacggatcaagctggtgcacggcgataccggactcacgccgttctccaccggtacctatgcctcgcgctcgctggtgatgtcgggcggcgcggtgtcgcgggcgtgcaaggcgctgctgccgcggctgcagaagattggcgcgcatatgctggggcagcgggtggaggcggtaacgtttgcagccggcgcggttcgtgcgggcgatgccgacgccatcgacatcggccgtattgccgacgcctggtacatcaatccccacctgctgccgcccgatgtggatgcgcaagggctggaggtcaccatgggcttcaagcccgcggtcgacaccggcagcttcacctacgccacgcatgcggtcgcggtggaagtcgacaccgattccggccatgtcgagatcctggactacgtggtggtggaggactgcggcaccatgatcaatccgatggtggtcgagggccagacctatggcggcgtggcacagggcatcggcaccgcgatgttcgaagagatgcgctatgacggcaacgggcagccgctggcttccacgctggcggactacatgctgcccgggccgaccgagattccgtcgatccgcatccatcatttcgagacgccgtcgccgcatacggaattcggcgccaagggcatgggcgagggcggtgccatcgcaccgccggcggcgatcttcaatgcggtgaacgacgccttgcgcggcttcggcgtcgaacttcaggagacgccgctgaccccgagaaagatccttgaagcgctggatgcggcagtggccggcgcacagagcaagaaggcagcctgaccgatgaaagccgtcgccttttcctatcatgcgcccggctcgctgccggacgcgctggcccgccttggcgcgggcaccgacgtggccaagaccatgggcggaggccagtcgctcggcccgatgctgaacctgcggctgacccgtcctgacacggtggtcgatgtgtcggggctggccgaactgcggcaagtcgcgtccacccccgatggcatccgcatcggcgcctgcgtgacccatgcgcagatcgaggacggcgtgttcgcgccgctgcagggcaccatgctgcaggccgtggcgggcggcattgcctaccgcgcgatccgcaaccgcggcaccgttggcggcagcctggcccatgcggacccggccgcggactgggtcgtggtgatgaccgcgctgggtgcgcgcatcgagattgcatcaggcaccggcacgcgcgaggtgcccatggaagccttcatgatcggcgcctacaccacggtgctggccgatggcgagctgatcgccgccgtgcgcgtgccgcacgccaccgcgcacagccgctggggctaccagaagctgtgccgcaagaccggcgagtttgccgaagccagctgcgccgcgtacttcgatgccggctgccgcttcgcacgcatcgtgctcggcgcgctggacggaccgccggtggtgctgcccggcctcacgcgcgcggtcgccgcgcaaggcgccgcggcgctcaccgccggtgccgtggacgaagcggtggcgcaggccgcgcccggcaaggacgccatcgaccgcaagctttaccgtaccgtcgtgatgcgctgcgtcacgcaaatgctgaactgaggagcgcccgtgcagaccatcgaattcagtgtcaacggccgccgggtttccggcgcgtgcgcggaccggacgcacctgggcgacttcctgcgcgacacgcaccggctgaccggcacccacctcggctgcgagcacggcgtgtgcggcgcctgcaccgtgctgctcgacgacaagccggtgcgttcgtgcatcaccttcgcggctgcctgccagggcgccgacatcgtcaccgtcgaaggctaccaggacgatgccgtgatggccggcctgcgcgcggcgttcaaccagcaccacgcgctgcagtgcggcttctgcacgccgggcatgctggcgaccgcgcgcgacatcgtgctgcgcctgcccgacgccgacgacgccaccatccgtcacgagctgtcgggcaacctgtgtcgctgcaccggctatatgggaatcgtcgccgccatccgctcggtgctggacgcacgccgcgcaacagccggcgtgattgcgcggcacgccgcgggcgcggcgccggccgaagcgccgttcaccggttttgccgttgcggacgaagcgctcggcacgctgcctcacctggccgcgggcaccggcgccgaggcggaacggtcagccgaccgcaagggctggtcgcgcatcgaaggcggcttcaccgtcccctatacgctcgacgcggtatgggccttcatggccgacctgccggccgtggcaggctgcctgccgggtgcggtgctcactgaaatggagggggagaaggtcaagggccatatcgccatcaagttcggcccgatgtccgccaggttcgaaggcgccgcgcgcctgcagcgcgacgacgcgaacaagcgcggcgtgctgaagggggcggggcaggactcgctcagcaattccaaggccgcgggcgacatcgcctaccagctgaaggcgcttgccgcgcacgagaccgaggttgcggtcgacctgcagtattcgctgcaggggccgctggcgcagttctcgcggtcggggctggtgcgcgatttcgtgcggcgcatgattgcggatttcggcaagtcggtggcgcgccggatggacccgacgctgagcgatgccgaacgcaaccaggcggtacgcctcaatcccgcggcgatgttcttcggcgtgctgtgggagcgggtcaaacggtggttcggcgcccgctgaacccgccctccgggctgtcgcaacccttgcccgcgtcagcccggatgcactacaaccagtagtgcggtggcagtggtcttgccgccattggagatcgcatgtgcgacatcggccgcatagcgcgcggtctcgccgtgcctcagcttcttttcatcggcacccgcgcgcactgtcatcgatccgctcagcacagacaggtgttcctgggtgccggcctcgtgtggctcggaggccagcacgccgccggcctggatggtcagctcataccactcgaagcgcccggccaggtcgatcgggcccaggatgcgcaggtcgcagcgggtatcagggcttttcagcgacgggatcgcgtgcggctggaccacggtgatgccgccggcggggcgctcagcggcgcctccggcgaggaagtccgtcaggttcaccccaagcgcattggccaggcgccacagcaccgccacggtggggttggccaggttgcgttcgatctgcgacagcatcgacttggaaaccccggcacggcgtgacagttcatcgagcgacagccgttgctgctggcgcagcgcctgcagcgccatgccgacggcgggcgggccatcggcctgcggggtctgggcgagggcttgcgtcatggattaatgttcgttatattgcgcaaaatgttcgatatacagaacgtgttcgatttatcgatcgaatcctagcatatccctcgcacaccaacgggagccaagccatgtcgaatgccgaggcattctatgcatccatccgtaccgaactcgaaagcatccgcgcggcggggctgttcaagaacgagcgcgtgatcgccacgccgcagggtgcgcgggtgcgcaccaccgacggccgcgaggtcatcaacctgtgcgccaacaactaccttggcttgtcgtcgcacccgcaggtgatcgaggccgcgcatgaagcgctgcgcacgcatggcttcgggctgagctcggtgcgctttatctgcggcacgcaagacctgcacaagacgctggaggcgcggctgtcggccttcctcggcaccgaggacaccatcctctatggctcggccttcgatgccaatggcggtttgttcgaaacgctgctgggcgcggaagacgcggtcatcagcgatgcgctcaaccatgcctcgatcatcgacggcgtccgcctgtccaaggcgcgccgctaccgctaccagcacaacgacatggacgacctgcgcgtgcaactggagcaggcgcgggccgacggcgcgcgctacacgctggtgttttccgacggcgtgttctcgatggacggcaccgtggcgcggctcgacgagatgcgcgcgatctgcgacgagtacggcgcgctgctgggcatagatgaatgccatgccaccggtttcatgggccagcgcgggcgcggcacgcatgaggcgcgcggcgtgttcggcaagatcgacatcattaccggcacgctgggcaaggcgctgggtggcgcctccggcggcttcaccagcgcgcgcaaggaagtggtggcactgctgcgccagcgttcgcggccgtatttgttctccaacaccgtggcgccggccatcgtgggcgcgtcgatcgcggtgctcgatatcctggaagccagcaccgagctgcgcgaccggctggagggcaataccaggttcttccgcgcgggactggaccggttgggcttcgacgtcaaggcgggcgaccacccgatcatcccgatcatggtctacgacgccgacaaggcgcagcaactggcgcagcgcctgctggagctgggcgtgtacgtggtcggcttcttctacccggtggtacccaagggccaggcgcgcatccgcgtgcagatgagcgcgctgcatgacgaggccgcgctgcaggcggcgctggatgccttcggccaggctggccgtgaactggggctgatctgatggaagctggcaaaccgaagatcctgattgtcggcgccaacggccagatcgggtctgaactggcactggcgctggccgagcgctacgggcgcaccaacgtgatcacctccgacgtggtgcccaccggccgccatgtgcatctgacgcacgagatgctcaacgccaccgaccgcggcgagctggccaccgtggtcgagcgccatggcatcacccaggtctacctgctggccgccgcgctgtccgccaccggcgaaaaggcgccacagtgggcctggaacctcaatatgaccagcctgctcaatgtgctggagctggcgcggcagaccgggctggagcgggtgttctggccaagctcgattgcagccttcggcccgaccacgcctgccggacagacaccgcagaagaccgtgatggagcccaccacggtctacggcatctccaagcaggcgggcgagggttggtgccgctggtatcacgccaaccacggcgtggatgtgcgcagcgtgcgctatccgggcctgatctcgcacaagacgccacccggcggcggcaccaccgactatgcggtcgacatcttccatgcggcggtgacgggcgagccctacacctgcttcctgaaggaagacgaagccctgccgatgatgtatatgcccgatgcgatccgcgccaccatcgaactgatggaagccccggcggacaagctgagcgagcgcggcagctacaacatcgccggcatgagcttcacgcccgcgcagatcgccgcggccatccgcgagcaggtgccgggcttccagatccgctatgaacccgactatcgccaggcgattgcgcagggctggccggattcgatcgatgattcggtcgcgcgcgcggactgggggtggaaggcccagtatggactgaaggagatggtcgcggacatgcttgccaacctgaaggccacgctggcgggctgaagcgctatggccccaacgggaagcgcgtgcgcgcagtggctcacgggatcaggccgcgcgcgcgccccagagccaccgcttccgtacggctttgcgcgcccagcttggcatggatgcggcgcaggtgcgacttgacggtcagctcggacaggaacagcttctgcgcgatcacccgattgcggtaacccgcggacagcatgcgcagcacttccagttcgcgcccggtcagcgggtcgggctggtgcgccggttccgccggcggttctgcggccggcttggtcgagcctgcgtcggtaagccgcgcgagcaggctcgcgacaaagggctcggccacgccaagcgctgctgcctgtgccagatggacacctgcccaggcccgcagcagcacggcaacgcgttcgccttcttccaggaaggagcgcaggaagccttcatggctggccaggcgcagggcttcggtcatttcctgcagggcggcatcgcgctgctgcatgccgtcgagcgcggtggcgcgcaggacgcgcagccggatcaggcgccagtagcgctggcgtgccagtgcggcgtcgatggcggcatccagcgcggacagcgccggcgcgatattgccgcgcgctatgtcgagccggcagcgcgcgatggaaggccggtcgatgtcgttggcatggccggtggcgtccagcgcttcccagccgccgtacaggtcggccgcctgcaacgcctgcgatgcggtttccagcttgccttccagcgtggcgacgcgggcccgctccagccaggccgagcacacgatgcgcgcggtgccggactgctgtcccagttgctccagttcagccaggcgctgcagccactggccgcggtcgccgcgcgccagcgcaagccgcgcgctcagcacgtgacaggcgatcagcgaatcgggcgggccgttgcccttgctgtagggcagcgcattggccagcaggcgcccggcctcttccagcgcatcgtgctcatacagcgccagtgcccagaacacgtcgctgcccgggctgtcgccggacgcggcgcgcaggcgcgccagcgcgttgcccaggcgcccctgcaccaggtcgatcacgccctccagcgtgtcgctgaggctgcgtaccggctggggctgctgcgcgcgcagcgtcgcccgcgacagcacgctgcgcgcttcgtcgtagcggtgcgtgcagatcagcgcgtaggccagcgaattggccaggatgcggtactggaagggctcgtcgggcgccaggcggcgcaggtgcgcgccggcggcatcgcggcaggcctcgacctggtcggtcatggccagcagcacgcagtggatggtctgtgcttccacccccaggcgcgcacgctggctgtcgtcgccgggttgctcaagttcgggctggaatgacgccagtgcggccatggcttcggcgtggcgccggttgagcagcagcacccacgcgcgcgtcagcgccagcgccggttgccgcgccagcgttgcgggatggatctgctcgaaccagcgcaacagcaggcgcacccggcccgtgcccagcagcgagtcggactggctggcaatggcgctgagcgcctcgtcatgacggcccgcctgcagcaggtggtccactgcggggatcgggtagccgtgctccaggtaccagtgcgcggcggccaggtgcagcggcgcgacccgatccggcgcctgcacggccagccggtgctgcaggaagctggcaaagagccgatggtagcggtaccacgtgcgttcggcatcgagcgggaacagcagcaggttggcgcgttcgaggtgatccagcatcgcgcgcgcgtcggcgcggccggtgagggcgtcgcatagcggcgcgctcagctgccccagcacgctggtttccagcaggaaggcgcggcacgcgtcggactgccgcgccaggatgtcctcggcgaggaattcgcccagctccaggtgagtgccggaaaacaccgcgacgaaggcggcgtggtcgctgcactgctgcagcgacagcgcggccaggtatatcgcggtggcccagccttcggtgcggcgatgcagcgtggcgatgtcgctgtcgcgcagcggcaggccgcagcggctgcgcagcagctgcgcggcctcgtcgacggaaaaatgcagggcggcgggcgggatctccagcaactgcccgcgcgcgcgcagccggcccaggccgatttccggcgcggtgcgcgagccgatcaccagtatgccgcagggcggcatcgcctcgatcagctgctgcaccaggtccagcgccggcaggctctgcaaggtctcgaaatcatccagcatgatcgcgaacggctgcgccgtggcgcccaccagccccaggatgcgctgcgccaggcgcggtccgctggccggctccggcgctgccgcgccgcgccgcttgccgccgcgcagcgcgtccaggccggcgtccaggtggaccagcagccgttgcaggtcattgtcgcccgcatccaggcgcagccacaccgtggcttgctgctgcgctgcgcaatgctccgcgtattgctgcatcagcgtggtcttgccaaagccggccgcggcccgcaccaggatcacgcgcgcagcgcggtcctgcgccatgcgcgcgaccaggtgcggccggccgatcgtggcggggtgcgccacggggggcgcgagcttggaggcgagcaccgtcggcagcgggccgccgctcacggcgtggttggcaaagggatgcaatgcactctcctgggggcgatgcccgtcaccgccaccctggcccgtctgtggcagacaagatcataagtgctgtatcgggaatattttggcgggagggcatcaggtccgggcgattgttccacggccctgagggttgcgtcctagttcgtttggacgattctgccggcttgccgaatttcctcccttcgatggacgacagcggtgcccgagcctcctacattgacccgcacgcgctcccggcagcggcccgcagaggctggccgggtatgacacggcaggatgccggcacggcacgaggccggctgccggagacgagacacaggagacaaggtatgcagcaaggcaggcgcagggttctgcagcaaatgggtctgggcgtcgcgggtgcggcgctggcaggggttgggctgggtgcgcgcgcgcagggtggtgcgggggtggatttcccggcacgcacggtgcgcatcgtgatgccatacgccgcgggcgggaccggcgacgtggtcgcgcgcatggtcgcggacggcctggccaaggcatggggcaaggccgtggtggtggacaaccggccgggtgccggcggcatgatcggcgcggacatggtggccaaggcagagccggacggctatacgctgttgttcgcgctgaccggcctggtccaggcgccgctgctgtacagcaaggcaaactacaacgcagtgcgtgacttcgcgccgatctctgagctggcgacctccaacctggcgctggtggtgcagcccgacgtgccggcggccaacgtgaagcaactgatcgactacatccgcaagctgggcaagccgctgccgtatggcagctacgggctgggttccagcgggcatctgcagatggaggtcttcggccgcaacgccagggttgaactgacccacgtgccctacaagggcgagggcccgctggtcaacgacctgcttggcggacaactgcccgccggcgtcgtggccgcggtcaccgcgcgcacgcatgcgcgcgccggcaagctcaaggtggtcgccgtggccgggcagtcgcgctcgccgctgctgccggaggtgccgaccttccaggaggcgggcgtgcccgggctggagcgccagggctggctgggcctgttcgcgccggcggcgacgccgcgcgccgtggtcgacaaggtgtctgccgacgtcaaccgcgtgctggccaaccccgagctgcacacacggctggtcgatctcggcatcatcgtcaagggaagctcgcccgcggcctttgccgatgtcgtgaaggtggagcagacctactgggctgaagcgatccgggcgtccaatatccgcctggactgatgcggccccggcagggcatggcggcaggcagggccggctggtgcgggcgcctgcctgccgcgcgtttactggtaggtcactaccaccacgtacgcgtccggcgtgccgcgttgcccggcacgggcgggctcgacgtccagccttgccacgccgatgcgggcttgcccggtcatccgggcaggcgacaacggcaacggcgccgagacgatctgccccgacggctgctggcagctcgcctgcaactgtccggcggacggacggaagccgcaggacgggtacgagattcccccaaggaacgtaatggtgccggtatgcgcggcagcggtgccgatacccgcggctgccagaacgcccactgcgaccagccggccggcaacgccggcggccttcctgctgagttcgaccgttttcatgactacccctctctcttattgtcagcgtggcgccgagacagggcgcctctgagaaccggcacagtgcaggcccacggatccgcgcgtgggccatattcatcatagcgacggtttcagaacattcttaagagttatgacacttctgtgacaattgagcctggggacggccgctgccctatcgcaggatcagccgcgagcgggcaaagcctgcatgggtgcgcagcgcctgcatcagctggtctgacggcacgcggtcgaggtcggtgaccacatagccggtgtggccgcgcgtctgcaggtgctggccggtgatattcacgccttcctgcgccagcagcgtgttcagtgccgccagggcgcccggcgcgttgccgtgcacattgagcagccgcgccggcgcgtgcagcgggccgggatcgacctcggggaagttgacggcgccgatggtgccgccggtggccaggaagtgcgccagcttggccgccacttcggtgccgatattctcctgcgcctcttcggtgctgccgcccacgtgcggggtcagcagtacgttgggcatgttctgcagttcgctgacgaaaggatcgttgttggtcttcggctcctccgggaacacgtcgatggcggcgccgcccaggcgcttctcgcgcagcgccgcggccagcgcggcgatgtccaccacgctgccgcgcgaggcattgatcaggatcgcgcccggcttgcaggcggccaggatgcgcgcatcgatcatattgcgcgtgcgcggcgtggctggcacatgcagggtcaccacttcggcctgcgacaccgcctcttccagcgatcccgcggcgcgcgcggaaccgtgcgagagccgcgccagcacgtcgtagtagaccacgcgcatgcccatcgattcggccagcacgcccacctgcgagccgatattgccgtagccgacgatggcgatggtcttgccgcgcgcctcgaacgcgccggcggcgcccttggcccacttgccggcgtgtgccagggtgttcttctccggaatccggcgcagcagcatcaccgcttccgacaccaccagctcggccaccgagcgggtgttggagaagggcgcgttgaacaccgggatcccggccgtggtggcggcttccaggtccacctgcgaggtgccgatgcagaagcagccaatcgagagcagctcgggcgcgctgcggatgtcgtcggcgcgcaggtgggtggcagagcggatgccgaccacgtcgtggctggccagcacctggcgcagttcggcaccggccagggcgccggtgcggcgctcgacctgcaggccggcttcagccagccgggcattggcgctctggtggatgttctcgagcaggatcgcagtggtcacgtttgttttccgcatggagggttggcggcgcttgccgcatcgccaccattctgcgcgcaaaaaagcccgtggaccggggagtccctgctgccggcaatggcaccggctgcctcgctggcgtcgcttcagcgcgagtggcgcgcgtcgccgccgagcgggtcgacgatgatcatggtctggcgcagcacgccggcatcatcgaagtagcagctgaaatgcgcggtctgcaagccatccttgtacatgcgccaggaccaggcttcacgcttcatcagggggtagtactggatgggctcgcgcggcaggccaaagtgctcctgcacgtccttcttggtccaggtcccgacctgggcgcggtagatctccgtctcggtcagcatctggcgatagttggtgagcttgccgccggcgtcgaaatcggcggcatagacctgatggccaaggggctggcgcgaccagatccagcggctggtgccgtcggcgaggcggtaggtctcggtgggggatccgaatgtactgcgtacggcactttctgggctgccgatcatttgcttgccggtctgttccggctgcaaggtcgcacaggctccgagcgagccgagcacgacagcggcgacgcacagttcgccgatacaccgggatggcgtgcgtgattgcatggcgctctcctgcggacgagatgcccgcatccggccattctccgtccgccaggccggcccgtgcaacaccggctggtgccgggggcaggcggggccggccggtcagtgcggcgccgggcgctggctcagcagcggcctttcttggcttgtcccggcgggcagaaggactcgttgccgtacgggtcgacgcggcagttgcccttctttgcctgccccggcgggcagccctgggggccgctgccgtaggtgtcataaggggctaccacgcagccacccagcagtgcgctgcaggcgaccagaagggccagagcggatttcatcgcattctccttgttgtgggggattccgtttgcgacaggagaatagatggtggcagcgcctttgtctgtaaggaatagtgaaaacgagtccgctcagggtgaatgccggctacttgcccgcgccgccggcggggcgcttcccggctggccggggccggcgcaccgcacggattttgccgctgttgccgccgccgcagaagaactggtcgccgccatcggactccagccccgacacgctcgcgccggccggcatggtgaccgattccagcaccgcgcccgattgcgggtcgatgtgccgcagctcgctctggtcaccttcccaggtgccgtgccagagctcggcatcgacccaggtgacgccggtgacaaagcggtcggacgtgatggtgcgcaggatcgcccccgtctgtggatcgacctggcggatcttccgctcccggtactggcccacccacaacgtgccttcggcccaggcaagccccgagtcgccgccgccgcccggcgcggggatcgtggccagcacgcggccgctttgcggatcgatcttctggatccggtcctcggcaatctggtacaggtgctggccgtcgaaagcagtaccggcatgggcggcgacatcgagcgagcgcagcgtcctgccggtgaccggatccagggcattgagcttgtctccgctggcaaaccagacccgctggccgtcatagctgacaccgtggacgttctcgacgccggggaagggaccatactcgcgaagcacttcggcttgtgatcgtttcatgctgtcatccttttggtttggggatggctacatgctagtcaaccggcagcggcgaggggagtaacaaggtcgtcgtgaatcccggcaccggcggcgtcatccagcggcgcgcacgcccgtggccaagggactggatcttgccggctgccgccagcgtttccagtgcccgctgcaccgagcgctggctggcacccagcgccagcgcgagagcggagctggaccatgactcgccatcggccagcaaggcgagcactgccgcgtgcttctcttccaccggccgcgccagcaccaccacctcgcgcgcgtggtgcggcaccagcgcgaagccgcgcccgcttgccgtgacgccggcaaatgcgccaagcaccgcgcgcagccgcccgatctcgacacgcagccgcgcgcggtgcgatgcatcggcgtgcctggtgcggaaggcgtgcgcgatcagcgtgtcccggggcacgtcggcgggccaggcctcggccagcgcgcgcgccagcgtgaacaacaccggccgcctggcgagcgggaccgtggtgccagcgcagcgcacggcatagcggcacgcgtccacgaccagcgctttcgatgccagcagcgcttcgacttcctcaagcagcagcggccgttcctcgccgcgcgcgatgcggcgtgccgcggggctgtgcagcgcctgggccgcgctttcgacctcggcgcgcaaggatggaatgccggcgcgctgcgccgcgtgcgcggcctgtgccagcgcggtgcgcgccggccgggtctgcacgcgccgcatcgcgatgcccgccacgatcagggcatgggttgtgcgcaatgcgggcgggaagggagtggggtcaagcccggcaagcgcctgctcggcgtcgtcgatgcggccgatcagcagcagccgccggatcgcgagataccgcgcatgggcggcgttgacccagtcgccgtgcgcttcaagggtggcgcgcgcacggtccagcgtctttgccggccagcccaggtcgcgcgaggcaaaggcgatttccgtttcggccaccaagcacctggcgcgcgctacggcttcgcgcggaccgaaggcgcgcgccgcgctgcgcaacagtgcccgggcgcggataaagtcgcccagttgcgccatggcgatgccgcgcaacgccagcgccggcggatcgtcgcgcagggcaacccggttcagcgcgccaagcggatcacccgcggcaagcgcgagcgccgcggcggcaatgcgtgagtccatccgaatcccgccagaaatcccgccacacttgtcactcccaccgttggaagccggcgcctaatctagcacacgaacaccaaccaacggagggatgcacgatgaccacacacagcaccggaacccgtgaagcatggctggccgcgcggcgtgaactgctcgaggccgagaaggatctcacccgacgcagcgatgaactggcacggcagcgccaggccttgccgtgggttcgaatcgacaagccctaccggttcgagaccgcggcgggcagcgcctcgctggcagacttgttccagggacgttcgcaactgctggtctaccacttcatgttcggcccggactaccaggcagggtgcccgtcctgctccgcgattgcggacgggtttgacggctttgtcgtccacctggcgcatcacgacgtcacgctggccgcggtgtcgcgggcaccgttggcgaagttgcaggcgtaccagcggcgcatgggctggaccttcccgtgggcatcgtcgcagggcagcgacttcaacacggacttcaacgtctggttcagcgaagcgcaacaacgccagggcgatatcgactacaactaccggcgcgaggcggcattcgcctggcgacctgaactggaggccggcggcgcagcggccgaggcccagtttgctgccatgtgcggcaccgatgccgcaacgtaccagcgcgaccggccgggcatgagcgccttcgcgctggaagatggcgttgtgtaccacacctattccacctatgcgcgcgggctggatggcctgtggggcatgtaccagtggctggatcgcgcaccgcgcggacgcaacgaggccggggtctggtggcgccggcacgatgaatacgagcagggctgaggcattccatgtccatcgtactcaccacgcacaggctggcgcgctcacgcggcaccggcccgcgccttgccttctttggcatcgtggccgtgctattcatcgccggcggggcggcgacactcgcctggcatgcatccatgccggcgatgagcgcgatgccgatgcccggcggctggaccatgtcgatggcgtggatgcggatgtgcggccagacctgggcccgcacggcaatggccttcctcggcatgtggatcgccatgatggtgccgatgatgctgccctcactggcaccgatactgtggcgctaccgccaggccctggcgacggcagggcaggtgcgcccgggcatgtcgacggtattggcgggcgccggctacttcttcgtgtggggcatggtgggcttcgccgttttcccggttggcgctgcgctggcggcgatagccgtgcaggcgcagggcctggcgcgcgcggttccgctcgccacggcggtggtcttggtgatggcaggcgtgctgcagttcaccccgtggaaagcacggcagcttgcctgctgcaccaacgcagcgggccgcacgcgcgcactgccggcggatgccggctcggcgtggcgccatggcctgcggctgggcctgcactgcacccggtgctgtgcgggcctgactgcggcattgctcgtcatgggcgtgatggacctgcgcgtgatggcagcggtgatgttggcgatgacgctcgaacgatggatgccggcaggtgcgcgcgtggccaggcttgcggtacggcttaccggggccgtcctggtcggcgtgggcgtggctacgcttgtgcaggcaggttggggcggatgacggcggggtactagtgtcctgttccgcagatagcttgccatgaaatcgcccagttggccgccatgcgtcgctgctcgtcgttgccatagctacggctatggcgcctcctcgcgcctagcctgacgaccaactggacgatttcacgttggcaagctatctgcggaacaggacactagcccagcgcgaccgcgaacagcgccgcaatcagcggccgctccttgcgcacctccaggcagcacagcgagtaatcgatcgacagcagcggctcgtcgaccggcaccacctgcaggcccggcagcgggatgcattcgatctgcgtgacgaagctgatgcccatgccattggccactgcatgcaggatggcctcgcggctgttgatctccatcacgcagttcagcgccacgccatgctgtgcgcacgcgcgttcaacccggagccgggtcttcgagcccggctcgcgcaggatcacggcttcgccggcgacctcctgcaccgtgatcgaagcgcgcgcggccagcggatggccggccggcatcacggcaacgatgcgctctctccgatacggcgcgatatgcaggccatcgaccggatcgggctcggccaggatgccgacgtcgatatcgaaatcctgcaggccgcgcagcaccgaggcttccgagccgatggtgaccgtcagttccagcgaagcatgggtggaacggaaactacgcgccagccccagcgcgatcggcggtgacaccgcgcccacgcgcaccagcccggtcttgagcttgtgcgcgctctgcaggaactgcatggcctctgcttcctgcccgaacaagccctgggtgatggcgtagagccgctcgccggtgtcggtcaggcgcacggtgcggcctgcgcgcaggaacagctccacgccgaagcgcgtctccagcgccttgacctggtcggtcacggtcggctgcccgatatgcaggtattgcgccgcggcagtaaagccgcccgtccgggcgaccgcatggaagcagcggatcgacttgtagtactggtggaacatggggtctcgatgggagctggccgccgttctgcgcggcgtgtgcggcgagtctcccacagacgcgtgccgttgcgtacagggtttccccgaggccggcagcgtgccggcgatccatcggttttggcgcacctcgccgtcaaagatgcgattggaccgggggtttggcgtctcccaaacttcagccaccaggaaacgcggctcaagccgccgcccaggctacccagaaaagaagtgaggagaccccatgaaccatgcctaccacaaccccgtgtcgatccattgcggggctggcagccttgaccggctcccggccctgctgcacggccggcgcgtcgtcgtcgtgacctttcccgaagcgcgtgcgctgggactggtggcgcggcttgaagccctgctgggcgcagaccttgccgggctgatcgaagacgtgcagccgaacccggatgtcgcccagttgtccggcctgtacaaccgcttctgggaagacgccgacgcctgcgacgccatcgttgcggtcggtggcggcagcgcgatcgataccgccaaggcgttgatggtagggaccaggtcgggccggttcgattcgctgatcagcctgctggcgaccggcaaggcgttcacgccggcgcaggtcaagccgctgatcgcggtgccgacgactgccggcaccggcagcgaagtgacgccctgggccaccatctgggacgccgcgaaccagaagaagtactcgcttcacctgcaggcaacctggcccgaagcggccatcgtggatgcggagctgatgatgtcggtgccgcgggacaccacgatctccaccgggctcgatgccctgtcccacgcgctggaatcgatctggaacgtcaacgccaacccggtttccgacaccttcgcgatttcggcggtggaggacatcttcgacaccttgccggaactggtgcgcaacctggacgacattggcctgcgtgagcgcatggcgctggccgccctcaaggccggactggcgttctccaataccaagacggcacttgcgcactccatctcctacgaaatgacgctgcgccatggcctgccgcacggcatcgcgtgctcgttcacgctgccgatggtgcttgaaaaggcgtgggcacgccggcccgaccgcgaccgcacgctgcagcggctgttcgggccggtgctgggcgacgggcagcagcggctgcgcgccttcctgcaggacctgggcgtgaagaccgagtttgccgactacggcgtctccgacgacgaggccggcgccatgatcgcgcgtgcgctggacggcgcccggggcaagaacttcatcggcgctgtgccggcctagtagcacgacccccggccgacgggtgcagccggccaacacgagcccgcaatacgggccgacaatacaagaggagacaaaaatggaaactgccgatcgcatccaggcaggggcgttcgtcgctccggccgagcattcgttccggcgcgcccagtggcgcatgctgctggccgcgatgttctgctacttcttcttctacacggggcggcagacctttggcttcgccattcccggcatccagcaggaattcgggttttccaaggaagcgctgggctgggcctccacctgcctgctgtggtgctacgccatcgggcaggccatcaacggcaacctgggtgacaagttcggcggccgccgcgtgatgaccgccggcgcgatcctgtcgtgcgcggccaactgggtggtcagcttcgccgtcggcttcaagagcctggcgattccctggggcatcaacggctacttccaggcccttggctgggcgcccggcagccggctgctgtcgaactggtggggcgccgaagagcgcggcaaagtctacggcttctacgtgttcgcggccggctgcgcctcggtgctgtcgttcgtcacctcgatcgtggtcgtgaatatcctgcacctggactggcgctggatcttccgcctgccggtgctgctgatgctggtgggcggcatcaccttcttcctgatcgtgcgcgagcggccggaagaccttggcttcaagtcgcccgataccggcgttgccaaggccgagggtgcggagaaggctaccgcagtcgagaccgatgccggcgaaagctcctggtcgcgctacaaggccgtgctgcgcaacccgcggcttctgatcgcgggcctgtcgatcggtttccagaatgccgcgcgctatggcctgatcgtctgggtgccggtccacttcctgggcaagaactggaagagcgccgagaccctgatcgacccggcctggatctcggtggcgctgccggtgggcatggccttcggcgcgctgtccaacggctggatttccgaccgcctgttcggctccagccgcagcaaggccatcatgctctacatggtgctgggtgcgattgcctcgatgatcatgtaccagctgcccacgggcatgggcgcgatcgtcgcgctgttccttgccggcttcttcgtgtacggccccgcctcgtccttctgggcgctgtgcccggacctggtcggcgccaagcgggccggcaccgccaccggtatcctgaacttcttctcgtacctgctcgcaggcctgggcgaacccctgatcggccgcatcctggaccagtccggcaatacctcgctggtgttcccgatcgtggcaaccagctgcatcatcagcgccgtgatcgcggccttcatccgccgctgagcgcgccgggccggcgccttgccggcccgcccgcgacggctgcatctccttccacacactgctcaagacccgagagggcaagctcatgaccgcattgcaagccattgccgaaatccgccacgaagcgctgcgcatcgccggcgagaagatctaccgcgaagacgtgatcgaggtgacctatccgtacaccggcgaagtcatcgccaccgtgccgaaggccacgctcgacgaagtgcgccgcgcctaccgcatcgcgcgcgactaccagcccacgctgacgcgctatgaacgctacaagatcctgatgcgcgccggcgagatcatcgcctcgcgcctggacgagatctcgcgcaccatcacgctggaatccggcctgtgccgcaaggattcgctgtacgaggtgggccgcgcctccgacgtgctgctgtttgccgccaaccaggcgctggtcgacgacggccaggtgttctcgtgcgacctgacccaccacggcaagagccgcaaggtctatacgctgcgcgagccgctgctgggcgtgatcaccgcgatcacgccgttcaaccacccgttgaaccaggtgatccacaaggtggcgccggcggtggccaccaacaaccgcatggtgctcaagcccagcgagaagacgccgctggcggcctacctgctggccgatatcctgtatgaggccgggctgccgccgcagatgctgtcggtcatcaccggcgacccgcgcgagatcgccgacgagatgctgacgcacccggacgtggacctggtgaccttcaccggcggcgtgccgatcggcaagtacatcgccgccacggccacctacaagcgccaggtgctggagctgggcggcaatgacccgatcatcgtgatggaagacgccgacctggaagaggccgccacgctggccgccagcggctcgtacaagaactccgggcagcgttgcacggcgatcaagcgcatgctggtgcatgagtcggtggcggaccgctttgtcgacctgctggtggcgaagaccgaagcgctcaactatggcgaccccatggacccgaaggtggacatgggcacggtcatcgacgaagccgcggcgatccagttcgaggcggtggtcaatgaagcgattgccgccggggccacgctgcgctacggcaatatccgccgcggtgcgctgtactcgccgacggtgctcgatcatgtcgatcccgaaatgaccgtggccaggcatgagaccttcgggccggtgtcgccggtgatccgcttcagggacattgaagatgcgatccgcatctcgaatggcactgcgtacgggctgtcgtcgtcggtctgcaccaaccggctcgactacatcacgcgcttcgtgcgggagctgaaggtcggcagcgtcaatgtgcgcgaggtgccgggctatcgcctggagctgacgccgttcggcggcatcaaggattccggactgggctacaaggaaggcgtgctggaggcgatgaggagctttaccaataccaagacgtattcgctgccgtggtaagcggcggtggcccgtgcgccgggggcggcagcgcagttcgtccctgcgctgcctgccccggcgcgtagtttctgctggtgtctccggtagccggggccaggtgggttctccggcaccaccaccccggatttggccgcctgagcaggcggctgctttgttttcaggcggcgctgtcctgcgccgcattcctgtttccgagctttcatgacaagcattcaatccgttgtgcacgaagggcggatgttcccgccatcccgccacgccagcgctaaggccgcgattcccagcatggaggcctaccaggcactgtgcgacgaagccgagcgtgactatgaaggtttctgggcgcgccacgcgcgcgagctgctgcactggaccaagcccttcaccaaggtgctggaccaaagcaacgcaccgttctacaagtggttcgaagacggcgagctcaacgcctcttacaactgcctggaccgcaatctgcagaacggcaatgcggacaaggtcgcgatcgtgttcgaggccgacgacggcagcgtgacgcgcgtcacctaccgcgagctgcatggcaaggtgtgccgctttgccaacggcctgaaggcgctcggcatcaggaagggcgaccgcgtggtgatctacatgccgatgtcggtcgaaggcgtggtcgcgatgcaggcctgcgcacgcctgggcgccacgcactcggtggtgttcggcggcttctcggccaagtcgctgcaggagcggctggtggacgtgggcgcggtggcgctgatcaccgccgacgagcagatgcgcggcggcaaggcgctgccgctcaaggccatcgccgatgacgcgctggcgctggggggctgcgaggccgtcaggaacgtgatcgtctaccgccgcaccggcggcaaggttgcctggaccgaaggccgcgaccgctggatggaagatgtcagcgccggccagccggagacctgcgaagccgagccggtgagcgccgagcacccgctgttcgtgctctacacctccggctccaccggcaagcccaagggcgtgcagcacagcaccggcggctacctgctgtgggcgctgatgacaatgaagtggaccttcgacatcaagcccgacgacctgttctggtgtaccgcggacatcggctgggtcaccggccacacctatattgcctacggcccgctggccgcgggcgccacccaggtggtgttcgaaggcgtgccgacctaccccaacgccggccgcttctgggacatgatcgcgcgccacaaggtcagcatcttctacaccgcgccgaccgcgatccgctcgctgatcaaggccgccgaggccgacgagaagatccacccgaaacagtacgacctgtccagcctgcgcctgctcggcaccgtgggcgagccgatcaaccccgaagcctggatgtggtactacaagaacatcggcaacgagcgctgcccgatcgtcgacaccttctggcagaccgagaccggcggccacatgatcacgccgctgccgggcgcgacgccgctggtgccgggttcgtgcacgctgccgctgccgggcatcatggccgccatcgtcgacgagaccggccatgacgtgcccaacggcaacggcggcatcctggtggtcaagcgtccgtggccggccatgatccgcaccatctggggcgatccggagcgcttcaggaagagctacttccccgaagagctcggcggcaagctctacctggccggcgacggctcgatccgcgacaaggacaccggctacttcaccatcatgggccgcatcgacgacgtgctgaacgtgtcgggccaccgcatggggacgatggagatcgagtccgcgctggtgtccaacccgctggtggccgaagccgccgtggtgggccgccccgacgacatgaccggcgaggccatctgcgccttcgtcgtgctcaagcgttcgcgtccgactggcgaagaggccgtcaagatcgcgacggagctgcgcaactgggtcggcaaggagatcggcccgatcgccaagcccaaggacatccgctttggcgacaacctgcccaagacgcgctcgggcaagatcatgcggcgcctgctgcggtcgctggccaagggggaggagatcacgcaggacacctcgacgctggagaatccggccatcctggagcagcttggccaggcacgctgaagatgcggcgcgactatgcccgattcagacaaggtcggcaattgtgcagtgccgccgagcgctggcccaaggtgaccgcagccccttgagctttccagacttgacgcgcgggatcattccgcaatggtctcgatcgtcagggtgacctcgccgcccatcgcggccagcatggccggaccgccgcccttgtaggcgacatgggtcatgttgagcttggcctgggacttgcgtgcggcgtgccgtggttgccggcagccaggaacgaagggtcttcgcgcagggcgccaggcatgcctgccggcgcggcgcacagcagcgcgttcatctgggacagctcgcgcagggtgtccaggtgcaatgcgctggtttccacgctcgcggtgcggcgctgcgcgacgcgggcaatgtggcgggcggtgaagcgctcggcgcgcgcctggaagtcgccggcgcattcgagaagcaatgccgaagctgcgcggtcgttggcaacaaagagcgacatcctggtacgcaggttggccaccagcatgtcgcatagttccagcagttcggcgctgccctcggccgagaagcagtagttgcgggtgagcttgcgctggtccaggtcgaccaggatccgttcgacgatatcgcccgcgtactccaggttgatattgaccagcatgatcgcatcccagcgttccgcatcctcaccgtcgaggctgccggcgtcgacgtcggtcaggtacatcttgacggacgaatagaggtcgtcgatgcggtcgtccagcgcgcggcagcgggcgttagcggcgcggtcgttgcccacgatcgagagcttcatgccatcgagcatttcctcgatcacgtcgccgatgcgcacgacctcgcgcgtggcattgcccagcgcgacggacgggtgccgcaggtcgccctggctcaggtagcgcgcgccgccgggcgctgcgtcgtcgtgcgcatcaggcagccatcgggtgcagagggccgccaccgggttgacaaaccagatcagcgttgcggccagggtcaggttgaaggccatgtggaagtcgatggccatggtgccggcactgctgcccaggcgcgccagcagccaggggatggcgtccagcagcggcaggaatgccagtatccccgcgaaccggaagatcaggttcgcgagcgatacccgtcgcgcggcaggcgaactgccggaattggccaggcaggcaatcaggccactgcccagattggcgccaagcaccagcggcaaggcggtggcaggtccgatgacgccgcccatggccagcgttgcggtgagcaatactgcggccaggctggagtaggccagcaaggtcacgaaggcgccgatcaccagggccagcagtgcgtcgttaccaagcgaggtgaagatggcgcgcacgatctcggcgtgcagcagcggcgcggcgtagaggcggatcagctgcaaggccagcgtgatcaaccccagtcccacgatgacttcgccggcctgtccgcgcaggctggccttgccggacaggcgcagtgcgatgccgatcaccagcagcagtggcgagagccaggagatatcgaccgtcagcaggcgcgccatcaggctggtgccgacgtcggcaccgagcacgatcggcagtgccgccggcaacgacaccaggccccctgcaacgaaggcgctggtcatcagcgccgtggcgctgctgctctggatcagtgcggtcacgccaagcccggccaggaagccacgcgcgggactggccgtgcccgcggccagcaccagccgcaagcgcggccccaacagctccagcatgccgtggcgcgtcacatgcgcgccccagatcagtagtgcgaccccggacatcagggaaagcaggatttgcatggcgccgccccctggtggtggctgtcttcgcggccacctttatctgcttgttgaggaagcgtgccggccaggccggcacgcaccggacttagtccgcgtggttcagcgccagccgcaggatgtcgaagttgcgcagccgctggcctgcgggcgcagtgaccttgcggttgaacagcagcggcaccttttgctcggacaggccgccatgcgagcgcagcggggcatccaggccgctcaggtcatggcgcgccggcgtggtgccgagcacggtcaggcgttcgctgaccaccaccaggtcgccgatgcggtcgggcggcagttcgaagcgctcgctggcggcgcgcttgtccagcaccagttcgatcccgggcagtgcggcgatggcttcatgcacggcctgttgattggtgccggcaggcaggtacacggtcgcgtaggagcccagtgcgccatggtgggcgacgtagggatcggtgatcggcagcagcacgcgcgtggcgtccgcgccgaaacgctcgtccagcacctgctgcaggaacaggatgttggccttgcccagcgaatcggtcttggcattcatgccgtggtcggcggtgacgccgatgaccgcaccgagcgcgtccaggcgctgcaggtagctgtcgatcatggcgtagaaggcattggcctgcggcgttcccggggcatgcttgtgctggatgtagtccgtggtggacaggtacatcaggtcggggcggacggtttccagcaaggccacgccggcggcgaacacgaattcggacaggtcggcgctgtagaccgagggcagcggcatgccgaccttgcgcagcacgtcgtcgatgccgttgtcttcgatggtggcctggtcggccttctccgccgagaagcagatgcccttgaggccgtggcccagcagcgcgcgcagcttgtccttggcggtgaccaccgccaccgatgcgccggcctgcgctgccgcagccagcacggtgggcgcgcgcaggtagcgggcgtcgttcatcagcacttcggcgccggcttcggtgtcgtagaagaagttgccgcagatgccgtgcaccgacggcggcacgccggtcacgatcgacaggttgttggggttggtgaacgacggcaccacgcaatcgccggtcaggacggtgccgcgtttggccaggctggcgaagaacggggtggcgcccgcctgcacggcaaggttgatgtattcctgctcgcagccatcgatgcagacgatgacggtgggccgggcgggaagctggtagtggtggccgttgacctggatctgggtgctcatggcgtctcttgcggaaggattgtgaaggggatttgcctgagacccatgctaagttaggcgataaactctcacaatcgagtttattttccagattctgtcaggaaatctcacaatgccgcacaagctgcctccgctcaacgccctgcgcatcttcgaggttgccgcccgcgccggcagctattcggcggccgcgcgcgagctgcacctgacccatggcgcggtcagccggcagatcgagatcctggagcaatggctggggcagccgctgtttatccgccagggccagcgcatggtgccgactgtccacgcgcaggcgttcgcgcgcgagatcagcacggcgttcgaccagatcagcgccgcttccgagcgctatggccgcatcgccacgcgcaaggtggtgcgcgtcaatgccccggcaacctttgccatgcgctggctgattccgcggctggatgacttccggcaccggcagcccgaggtcgacgtgcgtgtgtcgaccgccttcagcaacgaggcaggattcaatggcacctttgacgtggcgatacggcgcaccctcgaacgtggcgaacagttcgagtcagtgccgatcttttcggagtaccagacggtgatcgccagtccggcgatgctggagcaggtgccgttgcaaggtgtagaggacctggtggagggcgtcttcctctatacggagacccggccgggaagctgggaatcgtggctgcagcaggcgggacatgcctcgctgctgccggtgcgaacgctgcgcttcgaccatttctttgtcacgctgcaggcggtggtggacagccttggctttgccatcggcacctttccgaccctggaaacggaccgcgcggacgggcgcattgcgacgccgtttgccgccatccgcgcaccgggcaatacctatcatgcgctggtgccgcgcgatgccgacaagccgctgcatctgcgcgcgttcctggagtggctgcagcagcaggggcagacggccgcagcgacctgaagcggcgcgagccggggaagcggggcgagtgtggcgcgcggcccgcgcgatgcgggcctgcgctgagacgggagctcaggccccgtcgaggaacgcgctgcgctggcccaggcgcgagccgagcgcatcgggggccaggctcatgctggcggggtccacggccgaggcggggctgcctgccatggtcgggtcggcggctgccggcgccatgcccggctgggccgcctgtacgggagcctgggcatagctgccgcccgctgcgggtgccacctgggccgacggcgctgccgacggcatggcttgcacgggctgggcggactgcaccggctgactggattgcatcggctgcatcggctgcgtcattggcatcggctggctcggctgcaggggctgagcctgctgcgcaaacagcgggtaggacgcgatcatcgcgccagccacgaccagggatttcgccagatgttgcttcattcgtgtacctcctagaacgcctacaggcaagggaacagtcactgtagcgccgcagcacctgacattctgtttgattttgcaacggtcgttaaccagccttgccattgcggccagggcaggttaattgcgcgcgcggcctgcaaatcttgcgcggccgtcaacgccgggccaatcgcttgagcgccgcggggtccagcagttcgatctggcggtactcgcggcggatcaggcccgcgtcttcccacgcctgcaggtacttggccacggtctggcgcgagcggttgaccatgtcgccaaggtcctcagcgctgatgcgcacgacatggtcggtgcggtcggccagttccagcaggcgcgccgccatgcgcgcgtcgatgggcgcctgcgccgcgctttgcgcgtggtcgaacgctacgcgcaggcgcgcgcagatctgctgcacgatcagctgcatgccttccggatgcgcggccaggatgcggtggaagtcgcgctggctcagcaccatcagttccgtattgcctacggcgaaggcgtcgtgcgtgcgcggcttgccgtccagcagcgagatctcgccgaaccagcggccacgcccgatcaccgagtacaccgactcgcgcccgcccgtgctgacccggctcatgcgcacccggcccgacagcaccatgcagaagtaggtgggcggatcgccgcgcgcgaagatcatctcgccgtcgccaaagcgcaggcggcgtgcggcgttcgccacggcatcgagcacgcccggcggcgcattgcgcagccagccgctggccagcacgctgcgcggcagcgtgcgcgccggctccaccgctctcgatccactcttcacatcagccttcacattgctcccctgctggagccgagattgtccaatacttaacagactttggcgcggtgcgcccggacaatgcatcgattcaatgactcacatgcccccgggaggtacgcatatggcgcaaatccagctcgtcgattcaatcagggaccgcgtctccgacgccgaatggcagatgcgcgtggacctggcggccgcgtaccgcctggtcgcccacttcggctgggacgacctgatcttcacccatatctcggcacgcgtgcccgatgcaccggaccagttcctgatcaacccgtacgggatgatgttcgacgagatcacggcatcgagcctggtcaaggtcgaccacgaagggcagcccgtgctggaaacgccgtatgacgtcaacccggccggcttcatcatccacagcgccgtgcacgaggcgcgccccgaagtcggctgcgtgatgcacacgcatacctcgcacggcgtcgccgtctcggcgcagcaggcgggcctgctgccgatttcgcagcagtcgatgttcgcgctgaccgggctggcgtaccacgactatgaaggcgtggcgctgcgcgaggacgaaaaggcgcggctggtggcagacctgggccgctgcaagcagatgatcctgcgcaaccatggcctgctgacgtgcgggcgcacggtatccgatgctttcctgaccatgtacacgctcgagtccgcctgccgcatccagatcctggcgcaaagcggcggcacgccgctgaccatggtgcccgaagccgccagcgccaacatgggccagcaggcgcgccaggccaccaagggcaagggctccaacctggcctggccgggcctgctgcgccgcctcgaccgcatcaaccctgactaccgcaactgaccatggccatcctcgttcacctgccgtcgttcatggcggttcccatcactgccgcgctgcgcgaagccgcgccggacatcaccgtgtggaacggccgcgaggccgccgtcgcggaacaggtcgaagccatcatcgcctggggcctgaagcccggcgtgctgccggcctacccgaagctgcggctggtctgcgctgccaccgcgggcgtcgacaagctgctggcggcgccggacctgccgcctggcatgccggtcacgcgcatcgtcgatcccggccagcaggccggcatcgcccactacgtgctggcgatggcgctgcgccatacccgcgcgctcggccggtacgccgaacagcagcgccgcggcgaatggaagcgccacccggggcgcgatgtgtcgcgctgccgcgtgggtgtgctggggctgggcgagatcggcagcgaggtggcgcgcatgtttgccgccatcggctacccggtcagcggctggagccgcagcgccaagcatctgcccggcgtgaccgacttcaccggcgacgacgggctggatgccatgctcgcgcacagcgacatcctggtctgcacgctgccgctgacgccgcgcaccgagggcatgctgaaccgccagacgctgtcgcggctgcccaagggggcgttcctgatcaacgtcgggcgtggcgagcatgtggtcgagccagacctggtcgcactgatcgacgaaggccaccttgccggcgcggcgcttgatgtgttcgccaaggagccgccctcggcggacgatccggtctggaaccatccccgcatcgaggccacgccgcatatcgcggccgacccctcgtacgaactggtggcgcggcaatgcatcgagaacctgcggcgcgcgcgcgacgggcgtgaactgttgaaccaggtggaccggcaagcgggctactgagcgcccggcgtgccggtccgtccgggtggctatgtcacgcttacatccgcggttcccgccgccacctccagcagccgcgtgctcgccgtggcaggtagcgccggcgccgtgccgccctcgagcggcttgagcgtatggaaggtgcagctcagcttctcgggcgtcagggtgaccagcgtgtagccctcggcgttggagtcggcatggcgcagccacgcgttgaaggtgcgcaaggtggtgtcgaaggtgttcaccaccgtgctgcccacgtcgctgtagaccagttcacgcagtgcggcgaaggcctggtcgttgtcgacgatcgagcggaatgaactgagcagggagttgctcgacaggccggccgtgaccaggtccaccatcaccggcgctggcgtcgccgcatcgtagtcgtccatcacctggccggcaaagaatgcgtggatatcgccgctcagcgccaccacattgcgcacgccgttgttcttcaggaacgccatcaggttcttgcgctcggcgttgtagccatcccactggtcggcattgaggataaagcggtcgagcagcgcgatggccggcaaccggctttcgatcagcggcttgatgttggcatcgaacgtggcgctgtcgatgccgacctgcgccagtacattgcgcagcgccgtgtaggccaggttggcataggtgccggcggtcttggccgcgcgcaggtcgtcggccagcgcattggcaatggcgctctccagcgaggacagggaattgttggccagcaccagcgccctggcgatcagccgtgccaccgcctggatcacatccacctgcatgcgcaacagcgacaactggttggcccacagcttccacgcggtggcgtcggcgccgacgcggtcctgccaccacgcgcgctgcgcatcgcccagcatcgacaccggtgtcagcgtgccgccggcggcggcaatcttctgcgcttcggccgcagccagtgtctcggccgggacgaagtacagggcgccgactgcgcggccggtggcttgctcggagatgatgtggtcggcgcggtacaggcgctcgtcggtcatcagcagggtggcgagattgccgaaggtgaacgagcgatagatctggatgttctggaacgacgggttgttgacgtccaggctgacatcggccggcatgaactcgaaccacgcctggttggcagcgcgccggcgcgcggtgcgcggcgtcaggtcgtcgtcggagtcgtaggtctgccggtcctgccagcaattgtccgagaattcatggtcgtcccagatcgcaatcatcgggaacgcggcatgcagggcctgcaggcgcgcgtcggtgcgatagctgcggtacaggtagcgatagtcgtccagcgtggtggcgtagacgctgccgtccggcagcgcggtgccattgggcagttgcagcacgccgtggcgatcctccacattgccggcgcgcgagccgcccgggacggcctcgtagatgtagtcgccgacatggacgatgaagtccaggtcctgctgcgccagttcttccatgccggcccagtggttggcattccagtcctggcagctgacaaaggcgaaacgcagctgtgacaagggcgtgccggccgctgccgcggtgcgggtgcggccgacggtgctggggcggttgcccagcaggaagcggtagtagtagcgggtgccggggctcaggcccgtgaccttgttgcggatggtgtagtcccagtccggcagggccatcagcggttgattgaccagcaggctcggcggcgggaagtcaggctgcgccgacacctgcagccgcaccaccaccggccgcttgccattgctgccttccagccgcgtccataccaccacgctgtcgggcttggggtcgcccgaggcgacgccatggacgaaattgaaattttccggattgccggtgtcgggttccgggtcgtcgccgccgccgcaggcgctcagcccgccggtggcaacggtgacggtcaggaaacttccccacttgagaaactgtcggcggtccatggcgctcctcctgtgcttgcggtctcggtccacgcagcgcgcagccgcggccacgatgccgcttgcggcaccaggattcgtgggggcgtgctggttgctgaatgcatactagtggctggcctgcacgctcgccgtcggtgaggttccgacatcgatataggaggaagtcgactggttcgtgccggcgctggcgcaccgcgcaccaccgttgctggcgcgatcggcaagtcggcatgcattgcctgcgacgcggcctagactggaagcaaaagattcggacgcgagggcatcatggcgtacgacagcatcctggtccatctcgacggcaaccggcaggccatgcagcgcttgcaggttgcggcacgccttgccaccgccagccagtgtccgctgatcggcctgctggccgggcgcgtgccagaccccagctggttctaccgcatgaacaatgcccagcgctgcctggccgaagaccaggagcggcgccggctgcagcgcgagaacatgcgttgtgccttcgcggccgccacgcgcgagctggcggttgcctgcgactggcgcaccgtcgagcgcgatccggtgccactggcgctgcgcgaggcgcgcgaggccggcctgatcgtctccggccagtatgacgccgacaacgctgaaggcccggtggcgcggcagctgttggaggcgctgctgcttgagagcggccggccggcgctggtggtgccctgttccggcgctttcgccaccgtgggcacacgcgtgctggtggcctggaacggcagccgcgaggccgcgcgtgccttgcacgacgcgctgccgctgatggccggggcacgcgcgcgggtgctgggcgcccatgccgccagggagccgcgtgccgatgccactccggtcagccatgccgtgcacgtgctggagcgacagggtgtggcagttgaggtggagcacggcccgggcggtggcgacctggccatcggtgagctgatcctgtcgcgagcgtcggactttggtgccgacctgatcgtgatgggcgcctacggccacggccggctgcgcgagctggtgctgggcggcgtgaccagggtggtgctggagtcgatgacggtgccggtgctgttctcgcactgaagcgcagcgccagggttcatgcggcaagcccctccagcgcggcgccccccggtggtcttcagtcgaccgtgatgtggttggcctggatcaccttgccccacacgcccacgtcgtcgcgcacggtctgcgcgaactgctcggcactcctggcgggcgccatgcccatgttcagctgcaggaagcgctcgcgcatgggcgcgtcagccagcaggcgggtcacttccgcattgagccgctgcacgatggcggcactggtgccggccggcgcgaacaggccataccagctgtcggtatcgaaccggtagccctgttcagtcatggtcggcacgtccggcgtggccggcgcgcggcgcgtgccgctgatggccagcgcgcgcagcttgccggcgcggatcagcggcagcgacgacgaggtatcgacaaaggccaccttgaccacgccgccctgcatgtcggtcaggatctgcgccacgcccttgtacggcacgtggcgcagcttcatgccggtctgcatcttgagggcttccatggtcaggtggccgcccgagccgatgccccatgagccgtagtcgtatgcatccgggcgcttgagcacgtgggcgacgagctccttgagcgtgcgcgccgggaagtccggcgtcaccaccaggaaattgccgcccgcgccgacctgcgccaccggcaacaggtcgcgcaggccgtcatagggcagcctgggctgcagggtctggttgatcaccaccgtggcggcataggtgaacagaagcgtgtagccgtcggggctggccttggccacggtatcgttgccgatgatgccggtcgcgccgggcttgttgtcgaccacgatggtctggcccagcgccttgccgagcgatgcggccagcgcgcgcgcgaacaggtcggtgccgccgccgggcggggccggcaccaccagccggatgggcttggcgggccaggcattgctggcgcatagcgggccggccgcagcaccaagaccaagtgcggcaagcgcgcgcagcacgtcgcgccggcgcgcggcgttgccaggcagttccgtcggagccgggttcattgctcggggcatggcgtctccctagtgcatgccgaagttgtccgccgcgtcgctttccagcgcgtcggcggccgcgccgtacaggctgcgcgacacatagctgcggatctgcgtggcgcgctggcgcagccaggcggccttgagttggcgggcctcgcgcacggtgggcgtttcatcgggcgccagcgccagcacgtcgatcacgtgcagcgccagctgcgtgtcgccgcgcgcggccagggcctgcgcgtggcggatcagtgcgccatggtcggccacggccgcggcgatctcggcggccgcctgttgaggcgcggctggatgcagcgtggtggcattgcggtcccaccagccgttctcagagcggtagatgtcgcgcgcgatgtagctggggtcgccataggtggggcgcatccagggctggtcgaacaggtccgccggcggcttgagcgcggccagcacctggcgttcgttgcagccggcgttcatcagccgcaccacctccgcgcgcagccagcgcagggccctggcggtctggcacagcacgcgctggcattcttcctcgccctgcagcgtggcgccgaactcttgcaccacggtgcgcggctgcaggccggccaagcgttccagcgtatcggcccagcgcacggtgtcgcgcatcgtgcggaagggggtgccgatgttcgggatcgaatcgatcaccgcggggccgccgtacagcaggcgccggcccggcagccagaccgccacggcgtcgtcggtctcggacggtgcccacaggatttccgcgcggcgctcgccccggcccagggtcaggccatcggcgaaggtctcggtgggttcgatgtggaccagctttcccgccagcgcgccggccggctggcggaactggatctctgccatgcgctcctgcatgcgctgggtctcgcggtagcgcgcctgccgcgccagcacgttgacgtgggccagcacccgtggcgcgggctcgccgcgcgcggcggcgtggtccagccattgctgcaggccggcgttgtagcccatatggccgtggctgtagcagactgccagcaccggcagcccggtctgcgtgcgcagcgcctcgatcatgccgcgcgtgacgcgcccgccggggccgctgtcgaccaccagcaggccgccgcccacgtcggcgacaaagctctgcccttgtccgtgcagcagccacacgccgtcgctgacgctttcgatgccggtgccagtgaccagtgcggccggccggtcctcaatgtcctgcatgcttgcctcctctgcgaaccaggtcgcgtccagcgcaactgtcacgcaagaaggggcatcccggggattggggaaaatcccgccgggatgcggcgaaccggccgcaaaccaagcgccggtgcggcccggcggaggttttggaatttcatgtgtaaaccgctggttagcaccgcgcgggtgcagggagttccccgccggcacgcgctgcggtagcggctgccttcagtcaagtcggcgcagcggactgtcaggcaggttggacagatagtggacttcacgccgcagcaaggtggcgaactgcgccgccaccggcgtcatcggcgaatcggcgcggtagatcaggctgacggtgtggctgggcagcttgtcctcgatcggcaacggcaccaggccattggcggccagccggcctgccaccatctggcgcggcagcatgcacagcaggtggcggtcctgcatcaggtgctcgatcatgccgatggtgtcgcagcgcactgccacgcgcggcaatggcagatcgcgttcacggaaggcatcgaggatggcggcgcccgggccgtgcatgcgctggccggtcaggatccagtccgagccgatcagttcgcgcaggctgcgggcgttgcgcagcggatgctcgcggtgcgccatcacgaccgagtcgttgttgtagagcggctcgcaggtgaattcgcgctcgatgccctcatccgggaccgggctgactgccatgtccatcacgcccgagcgcagttcgtccaggtgggtcgggtagccccagctgtcgatgcacaccagcacgtcggggtgctggacgcgaaagcgcttgaccaccgcgggcagcagcacatgcgccgggccgcgggtggtgccgacgcgcaccacgccgttgcgcgcgcccagcatctgcgccatttcctcgctggccttgcgggcctcggtggcgatcagccgcgcgcgccgcaggaaggcatcgccgtagcgcgacagcaccacgccgcgggtggtgcgggtcagcagcggcacatgcagctcctcttccagctggcggatgctcttggtcagtgccggtgccgacacgtcgcgcgcacgggccccggcgcggatgctgccgtgctcggccacggcgatgaagtcctggacttggctcagacgcatggatttggctccactcaaacgacgcactgggcgcacagcatagcggcattccggcgggttcgggataaccccagggtgctaaccattggtttgcaccgaggcagttttagcatctgccgtgatgcgccgtgccaacgcatgatcgctccacatcgtcgcaaaccgccggccgcgccggcatcttcgaggagtggcatcgcatgacgaaccggcaagacctgccgctggcaggcatacgcgtggcggagttcgggcagttcatcgcggcgccgggcgcggccatgatgctggccgacctgggcgccgacgtggtcaaggtggaggccttgcgcggcgacagcgcgcggcgctttgacggcaccagcccgcagagcccgatgtacctggcctacaaccgcggcaagcgcggcatagcgctggacctgcgcacgcccggcgggctggacgccgcacggcggctggcgctggccagcgacgtggtgctgcacaacacccgcgccggcgtgatggaagcgctggggctggacgccgccacgctgcgcgcggcgcgtcccgacctgatccatgcctccatcagcggcttcggcacgcgtgggccgtcgcgcacgcgccccgggctggatattgccgcgcaggccgagagcggcatgatgtccgtcaccggcgaggccggcgggcagccgctgaaggccggttttgcgctgatcgacgcggccaccgcgctggcgaccggcaacgccatcctggcggcgctgttccggcgcgagcgcaccggcgccggcgagaccatcgagacctcgctgctgtcggtcggcgtgcagatgcaggcccagctgtgggccgagtaccagtgctccggcgcgctgccggtgcgcagcggcaacagccagcccaaggccgcgccggccgcggatgtgatcgcggtggcggacgggcatatcgtgctgtcggcctatctcgacgagcactggacgcgcctgtgcgaggccatcggccagccggcgctggcgcacgatccgcgctttgcctgcaacgcgctgcgcgtgcagaaccgcccggcgctgctggccatcctgcacgacgccatgcgccacctcagcggcgacgccgcgcgcacgctgctggagcgccaccaggtggtggtgggcgtggtgcgcgactaccaccaggtcaacgcgagccccgacgtgcgcgccagtggcgtgctgcaagccgttgacgacggcgagggcggccagctggagctgccgggactgcccttcaccatggccagcatgccggcaggcgcgatgcccgcggtgccgcgcctcggccagcatacgaccgaggtgctggccgagctcggcttcagcgccgcggagattcacaccatggcccgcgccggcgcgatcggcgtggaacaagcccggcaggagcccgcatgaacaccccccaatcccctgtactgctgcagcgccatgccggctgggccgaggtggtgctgaaccgcccggcccgccgcaatgccgtcgacatgtcgctggcacgcgcgctgggcgacgccatcgagaccctggccgccgacgacagcgtgcgcgccgtgctgctgcgcggcgccgacggcgccttctgttccggcctggacctgcaggcactgcaggcggagcgcggcgggctggccgcgtttgcgccgctctgggagcgcgtccacctgggcctgctgcaaagcagcaaggcatggatcgtggcgctggagcgccatgccatcaacggcggcgcggcgctggcgctggccggcgacctgctggtgtgcggcgccggggccttcctgcagatcggcgagatccgcctgggcatggccgcgccgcgcaatgccgactggctggcgctgcgccattccgaggccgtggccgcgcgcctgtgcctgcttggcgaccgcgtgcccgcgccggagctgctgcgcctgggcattgccaccgaactggtcgaagacgccgaggtgctggaccgcgcgcgcggcctggccgccaccatcgggggttttccggctgatggcgtggctgcgatcaagggcggcatgcgcgccgcgacgaggcgcatggcatctgctgcgcgcgacaagaattcctgaggaccgatatttccatgacagattccatcaccaccgacgacgacgcgtcgctgcaggacttccgccgcgaggtgcgcgagttcgtcgcccggtcgctgccccatgccgtgcgcgagaaagtccgcctcggactggaactcagcaagccagagctggtcgactggcagcgccggctggccgaacgcggctggctggcgccgcactggccggctgaatggcagggctgcaactggagcgccgagcgccgcgccgcattccaggaagaactggtgctggcgcacgcgcccgagagcggcggcatcaccttcgagatgatcggcccgatcctgatccgctacggcacgccggcgcagcagcagtacttcctgccgcgcatcctgaaccaggagcactggtggtgccagggctattccgaaccgaactccggctccgacctggcttcgctgaagacgcgtgcggtgcgcaagacgcggcccgacggcaccgaggtctacgtggtcagcggcagcaagatctggacctcctacgcgcagtacgcggactgggtcttctgcctggtgcgcaccgataccgaggcgcgcgcgcagcggggcatcagcttcctgctgatcgacatgcgcagccccggcgtcagcgtgcggccgctggtgggcatccatggctggcacctgttcaaccaggtgttcttcgacgaggtggaagtgccggtgcagaacctcgtcggcgaggagaacgccggctggaccatcgccaagtccctgctcgagcatgagcggctgaacctggcgcgcgtggcggagaaccgccgccgcctggccaaggtgcgcgccatcggcaacgagctggaggagggcggccagccgctgtcgcagcgcccgtggtttgcacgccggatgcgcgcgctggaggtgcggctcgaagcgctggctgcaaccgtgctgcgctttcgcaagcgggcgcgcgccggcgaaacgctggggccggagaccggcatgctcaagctgctgggcagccggctgatccaggacatcgagaacctggcggtcgatgcgctggggccggacacgctggcctatgaccgcgccgcgcacttcgagcccgccgtgccgcaagcgggacagtcggcgtacgccgcggcggcatcggcgcgccgcttcgtcacccgcggctactccattgccggcggctccagcgagatccagcacgaactgctggccaagcaggtgctgggcctgtagtggctccaatcgtgcccgcaacccaggacaaggaactgaacacatgagcgatccaacggacgatcgccgcatgctgcaggaaagcgtgcggcgctatgtcgaacgcggctacggcttcgagcagcgccgcgcggcgctggccgagcccgatggcttctcgcgcaagcactggcaggcgtttgccgaaatgggctggctggccgtggggctgcccgaagcctgcggcggcctgggcgatgccgcggaccaggccctgctggccgaggaactgggccgcgcccagcctgccgagccctggctggccaatgccgcgctgtgcgcgccgctgctggccgcctgcggcgatcccgcccacgccgcgatcgcggcggcgatggccgagggtggcgcgatgctggcgctggccgcatgggaaacgcagggacgctatgacgccttcgatatcagcaccaccgcgcaacagcatgagccggggcaatggacgctggacggccgcaagaccctggtgctgggcggcggcagcgccgcggtgctgctggtgctggcgcgtagcggcggccagcgccgcgaccgcgacggcctgacactgttcgcggtgccggccgacatgcgcggcatcagcgtcgatgcgctgccgacctacgacggccgccagaccgccagcgtgacgctgcgccgcgcgaccgtgccggacagcgcgcgcatcggcccggtggacggcgcctggccgctggtggaagccgccatcgaccaggccacggtgatggcctgcgccgaagccgtgggcaccatgtcgcgcgcgttcgacctgacccgcgactacctggtgacgcgcgagcagttcggccgcgcgctgacggccaaccaggtgatccggcaccggctggtggacctctatgtcagcgtcgagcaggcacgcgccatcaccgagctggcggccaacgccctgcatggcgatgcggtggcgcgcatgcgcgcggtatcccatgccaaggcctttgtctcggatgccgggcgcgcgctcggcgaagacgtggtgcagctgcacggtgcggtgggcatgaccgacgagatggaaatcggccactgctacaagcgcctggcagcccacgccaacctgttcggcgatgccgactggcactacgaacggctggcggcactcgatcacgcggcgcaggcgcaagcctgagccggttcagccagggcgcccgggccgctgcccggtgcgcccacccatgacacgccggcaacgcaccggcatgcgcggccaatgcgccgcaacggagacagcaatatgagcagccagcacactggcgcccgcagggcttgtgccacgcgcacagcagccctggccgcggcgctggccctggcgggcgccgccagcgcgcacgccgaggccccgtaccccagcaagcccatccgcatggtgctgccctcgggcgcgggcaccgtcaccgaccagacggcacggctggtggccgagcgcctgaccgccgcgctcaggcagccggtggtggtcgacaaccgccccggcgccaacggcatcatcgccaacgagaccgtggcgcgcgccgcgcccgacggctacacgttgctgttcacctatgccgcgaccatgacggtgaacccgtggaccacgccgtcgctgccctatgacccgatcaaggacttcacccccatcgcacgccccagccagcccggcggcaacctgctcgcggtcagcgccaatgtgccggtgcacagcctgcaggagctgattgcctacgccaggtccagcaagacggaactggcgtactgctcttggggcgtgggctcgggcggccacctggccatggaatacctgaaggccaagaccggcatccacctgcgccatatcccctacaagaccgccacccagtgcagcaacgacctggccgcgggccacgtcaccgtcggcatcaccgacgccatctcgtcggtcccgcacctgaagtccggccgcatacggggcattgcgatctccggaccggagcgcctgctgacggctccggacgtgccgaccatgtcgcagcagggcgtgcccttccagcaagccagctgggtcgcgatcttcggccccaggggcctgcccgcgccgatcgtcaaccggctcaacgccgaggtgaatcgcatcctgcagacaccgggcgaccgcgagaaattcactgccatgaacctgcagccggccgcgccgtcgagcccggccgacctgggcaagctggtcagcgccgacctggccgcgtggggcgaggtggtgaaggtggcggggctgcaggcgaagtaaggctggaccacaacaacaacgggagacaggcagcgtgaaggtaagacagtggatggtgatgggtgcggcgctggccgcgggcaatgccgtggcgggcacgatgcagttgttcggggtggtcgatgcatcgatcgaatacgccaggggctcggaaagcgtggtgcgcatgcgcgaaggccagcaggccgcgtcgcgctggggcatccgcggcatcgaggacctgggcggcgggctcaaggccaacttcctggtcgagtcgggcttcaatatcgacaacggcaccgagttcttcggcaacaaccggctgttcgggcggcaggcctatctgggcctgtcgggcaactggggcgagttccggctggggcggcagtacacgccgtcgttctatgcgctgctgcggctggatccgttcctgctcaatggcgcggtgtcgccgttcaacctgctgagcgcgaccgcatcacagggcaccgggcacgtggcctacggcgcccgcttcgacaacgcggtgcagtatttctcgcccaagtggggcggcttttccttcggcgcagcggtggcgccgggcgaggtgccggggtcggcgcgctcagggctgaacttcggcatgaatgcgacctacgaggccggcaacgtctacgcgttctactcctaccaggggatgtattcgggcgccaacgtgccggtggaaccgacgctgacttccaaccatttcgtcggcggctcctatcgcttcaagccggtggaaatcggcctgctgtacagcgccgccagcagcgaccggcccgagacccgctcggcacgccactacggcgtgaccttcagctggaacgtgacgcagcgcgacaccttcaaggccgccgcactcaagcgccagatcctgggcggcggccagcggccgctggcggtgacgctggggtgggaccatgacctgagcaagcgcaccaccgcctatgtgcgggcggtgctggtgcataacagccctggcggcagcgtgagcaacaacagcatcgtgatcgatccgggtagcggggatgatgcgaagtcggtgagcgtggggttgcggcatcggttctgaaacggactgctgcccgttcatgcggcgctgaggccaagcggctgaggctacggagacccggggcgggctgccacctgtcccgtggcgctccccgcaaactgggggagggcgccaatctctagaacgcatcccgggctgtcgctcgtgtcgggtcattttcctttgtgcttactcttcgcgcttcacaaggcgaacgaaatcgcacggaacgaccctatagatcatggcgatacgagattgatataggacatcccttaatttctattggaattctcattcaatcgaaaacaatggcgatatctgaataatccaccttccttcctcaacgcataacggctaccgtacgcgacgaacgcatcttcttgacggtcatgcaaatgacgcgagaagcaaagcaccggaacactggtgcttctgcggcaagagaaagttcaacgctacggagtgctgcacttggataaccgaccgccgttcctttcctcccgcaccgtcaccgtgtctggtccggcgttgccggaactcttcggacagtccccctttaccttcgtacgcctggatggcaaggaaggcgtctgcggcctgttcgaatacgacatcgaactgaagacgccggacaaggcctacaacttccacggcccggaaggcaacttcgacttgcgcgagatgaacgggcgcgagctgaccgttcgcatcgaactggatggcatgggcaccgggatggcaggcggcgtgggtgccggcacgcgtgagatcagcggcatagtggaccgcgcccgctacctgcgcgccgaagggcggcactttgtctacggactgaccctgcgtccctggctgtggatcgcctcccagaaccggaacagccgcgtcttcgagaaccgcaccgacatcgagatcatcgaagaggtcctgtctgcatactcctttccggttgagcgcaggctcgacgtggcgaaataccccaggcgggtctaccgcacccagtgcgacgagagcgactacaccttcatcgcccgcctcatgcagcactggggcatatcgtggttcttcgaacattctgacggcaagcaccgcctggttctggtcgatcacgtcggtggctatttcagcatgccgagcgaggcgtaccaggtgctggaaatccatccgcctggcgtcagggtcgaccaggaacacctcgatgcgttctcggttgtcgatgccgtggtcgcaggcaagtacacgaccaatgcctacagcttcacccagccgcgcggcaacctgagcgccagcagttcggacccgcgggacacgggcctgaacactggcgcgctgcaccaggaggtgtacgacttccccagcgagcatgcccagccggccacggacaaccgcccgtgggacgaaggcgacatgatcgcccgcatccgcatggaggaaatccgttcgcgtggcctgcgctgctttggcaccggcaacctgcgcgcggtggtgccaggctgcaccatgaatgtgaagggacacccccagcaggcggccaaccgcgagtacgtggtgcttggcgccaacctcaggctggaagacgtggccgaggcctccggcgagggccagcgctggcattgccgcgtcgagttcgagtgccaccccacccatgaggtcttccgtccggcgctgagcatcccgtggccggtggtcgctgggccgcaaagcgcgaccgtggtcgggccggaagacagccatgtcgtgtggccggatcagtatgggcgcgtccgcgtccagtttccgtgggaccgcttcaacaagatgtcctgctgggtgcgcgtggccacgccgtgggcgggctcacagtacggccagatcagcatcccgcgtatcggcagcgaagttctggtgatgttcctggacggcggcgatccggacaagcccattgtgatgggggcggtgccgaacagcctcaacatgccgccatggcagctgccggaccagctcgctctcaccggcattcgcagccgcgagcacgatggtggtcgtagtaaccacctggtgctggacgacaccaagggaaaaatccaggcgcagctcgcatcggaccacctgcagtcgcagatcagcatggggtacatcaccggcattcctgacgtgcagggacgccgcgacaagcgtggtgaggggctggaggcgcgcaccgatggacatgccgcgctacgcgcggcgttgggcatgctgctaaccacctacccccgatcccgcgcacgcgacgcgtgtctggtacgcctattcgcatgtggcctggaccaaggcccaactgaacgacaacaagcacaaagtcgatgtgcgcagggctcatatgcaatgcctcgacgtggccgcctggatgggcaaccagaaccagccacacgccggccgcgcgacggaaatcaacaagcgcgtggcatcgttcgccatgacgcccgaagcgcagcaacaagcattccggcatctgagcgccacaccacccggaaccattaacctgggcgagattgctccgattggccccataagcggttcgatgcttgcggatcggatggagatcgtgtcccccggcaaggcgatgatgctggcgttcaatgatccgctcgcaatcactgaagacctgggcatcctgaccaatcccaagctgcacgctaaggcaaacaacggcgtcatctgggacaaggcaacagatctgttcctggatacgctcgaaaagaacatccgggccaacgccgaggcgcagcacacgaaagaggcggaggccgcggcggccgaggctgagcgcatgaagaccacgccggatggatttccggcttacgaactcatgtcggttctgtttaatggaaaagcgacggccgagcgatggaagcgcgaagatgcggagcgtgaagccacgcgacttgcccgcaagaaagccgccagtgacgccgcctggaaaccctacgaagacgaactcacgccaggcaagcgccaccaggacctgagtcccagactgaaggccctcaacgaggacgtgctggcacccattgcgacctcgctcgcacagtggctcatgagtcctcagcttgcttcctacatgcaataccggcatgacaagatggacctgccgcacggctatgtctacaacgaatccctgacgcgctgcctggagaacgcgctcgacaccgtggaatgccgtcgggtcatccagcgttggttcaacgaggcgaatccggagaaccacagcaatctgcttgcgcgcgccctgttgctggaccacaagcccatcatcgacacggtgccggacccgaccgaccagggctatgctgccatcttcggcatcctgaagagcggtctcgacaagatggactccatggcaaagggcctcactcttcccgaagccctagcgaagatgggcctggtaccgcgcctgacctggatactggccgaccagatcatcccgacccttgcaaacagcttcagttcggcatcggccaggctcgccttgtacgggatgagcctgctaggcggcgtgcgcctgatcgccccgacggccagcgtcatgcaaatccgcgcggtcgtgctgaacgatctctccacagtgaatccggagttgtacaagcaactggaccgcacccgacggcgcgaggacgccgtggcactcggacgcgcggccaagcgcatggctcaaaccgccagattggtgtggttcaagacagaggacctggagcgcattccggaactgagcgccctcaagctgcgtaccgccaatgacgtgcctggggtgcggcaagtcaaggcggtcctgggttcacgcttcgtgaatgtcggggcggtcgcctgcatcctgcagggactggcactctatcacgccacgcaatcgttccgcgcagcgggcgagttcgacgaacccgaaagaggaatcaagctggtcggcggcctggtgtccatggccgggacccttgccgagcagactggcgtcgtgctggagaaggcgccgacgcacgtaattgtccggcgcatcatgcgctcgccgccgaaggcggaatggctggaaatgggcaagaagctggctgtcagagggcgttggattggttttgccggggctgcagttggggtgggatgggatgcgtaccatgcctacgatgaaggcatgaggggaaaccggacagtctcaatactatattttggctctgcgatgtccggaggcgcagcagccgtcctcccgctggcgactgaagaattcctggccttcctcgttggggtgcctagctggccgttcctagtcgtgttgctcgcggtgaacatcggcatcctgatactagacgacccggcgacgctcaagtgggccaagcgttgccgtttcagcaagggacccgccagcgaacgctacaccagcctggagaccgagtcgttcgagttcgtgcaactgggcctcaaggacgtcaaataggactcttcgatgaaattcccgaccaaggatgaacgcacgcctttctacttccgccaacagggcaaaccgctgggcaagtgggagcaagaacaccggctccatgtcggccagcctgccagcgagcatgtgctggagagcggcaatgtctaccgcattgattcgacctgcctggagatcaccgatgagtcgcaggctcggatgcagaacgttggtctgctttggattatctgttcagcatttgcgtcgttttctctcttttacggattattgcttgcaactagcccattcagagactctgaggaaatgatggcgaagaacgggtattggttcggtacgatcgtcggcatattacttggctttagttctgcaggcttcttcggtctgcttgccttcgatccgatgcgtcgcaacatgttcacgctgaagcgccgccccatccgcctgaaccggaagacccgtcgtatctatgccattcgcaccaaggacccgggcggcatctgggaagtgccatggaaccatgacgaattcttctgtgtgggccatcggcgcatgggcggattttcacgcgcctatgacatgtacgacatccgccattaccagctcgacgcgagtggcaacgtcgtccgcgcattcgtgctcggccagttcgtcttcaccctggaagaagcctacgcgcagtgggaatactaccgccgctacatgcaggacgggccggctgggctgcccgagccatatcgcttctgggcgccgcgggaaacgttctgggaaggctacaagatctgcagagggggtaaattctccggagcgttcttcaccttgaccgacgtcatctttgcaccgttcgcactgctggatgcgatcgcccgctggctcgtgctcgtcacgtgcagtgatcccgtgtggccgccggagatcgaggcggcgtgcaagcccatgcccaatgacccgtacgcgcgcccgtacgccgacgactacatcggcgtgccgagcggcccggatgccaggccctcccgcgaggatctggcgcgaatgctcgaccagcagcaggagcgacgcaagcgtggcgcgctgacccgcgcggaagcggaagccctgcttcgaagcactacggaacagaccacatgaccgccacttcgccgctaccagcgcctcacgttatcttgatagagcaaccttccaaggtaccgggcaagcgcggaatggaaggattctggggcatgcgctacgggaacaagacggtcctgactgcctacctgtcgccgatcgacctgctgttggactcaatgcggggcagcgcccccaatcaagccttcaagtttccatcccttgaccggctgcccgcagcccgcgtgaagcaaaccttcccgaccggcgtggagttggacattgcctgcggctttctcgcccgcgacggacagctcctgctcagcccaagcggcaagtggcggcgcaacgtcttggtgcatgacgtgcgcgcgccattgcggatgggaattcttatgcctgaatacaccaccgatggccgacgcgagatcagccgtctctttgagggcgcaggtctctttgcctggcaggacacactgcagtcgctagccaggatctggaagggcgaccgcatgaagcacgcaatagacagcgcgctggcaaccgcaagtacggtagtgcattcggctggccaggtcgtgaaccagatcgccgtattcgatccggaggcggaacaatggcattttgtcccttgccagacgatggacgatgtgccggagaacaatcacccacatggaggcggcgacagcgccacggtaggctgacgttgattcggagcgtctcggccagacgacacgttgttcaattcagcctttccttgaggccatgtaatttgagaccctcacctcaccatgcagaccggcgaaatatcaaggaagtcgcgccggcacggtatcccgtgccggcgccattcacttgccgcagccctacttcaactgctgcgcaaactcatccagctgcgtaatgcagatgccccagccttcatagaaccccagctcctcatgctgcttgcgcgtggcctcgtccggatgcatcacgcgcgcaatgtagcgggtgccgtcaccctcgtcggccatggtgatgaccgcggtcatcgacagccacggcttgttgggccggtacccggccaccagggccgaggtggagacgatcttctccatcggcacgatctcgaggaagcatcccgggttgtcgctgacgccgccgtccgggcctttcatgagggtatggaaggcgccgccggggcgcatgtcgaaggccaggacctcggtggtccagggtttggggcaccaccattccttgagcagcttgggatcgctccatgcacgccagaccttggcacgcggggccttgagcaggcgcgagatgaccaggtcctggctttcagggctggcggcgttttcattcggcatctgactgttcctcctgatgaagggcttcgacaagagcggccaggcggtcggtacgggcctcccacatggcgcgctggtcggccagccattgctgcgcgtctgacagcggttgcggtaccagttcgcaagtgcgcacgcgccccgtcttgcgcgagcggatcaggccgctgcgctccagcacctgcaggtgcttcatgaacgagggcagtgccatcgtgaacggtgccgccagcgccgagaccgtttccggcccgcggccgagcacgctgacgatggcgcggcgggtcgggtccgccagcgcgtagaacacgtcggaaagcggggaaatatcgacagcctgggacacgtcagcaaactcggcacaatggttagccatggggctaagtatagggaagcaagcggaaactgcaagcgcgaaatgcaagacgccccggcatcagccggggcgtcttgtgatcggggaagcggggcgcaggctattgctgccgcacgtacgccgccagcgccttgacctcatccgccttcaagccggcaaacggcggcatcggcaccgatccccatttgccgctgctgccgccgcggatgctggcttccagcttggcctgtgcctgcgcatcgcccttgtagcgggtggcgacttcgtgataagccgggccgaccaccttctgcgtcacgctgtggcagctcaggcaggcgttcctggccagcaggccctgcacgtccaccgcggcggcggcaggcgccgaggcggccgcgggtgtggccggcgcgggcttgcccgccttctgcgcgatcgccacgatctccgggtccttgatcctggcggagccgtaggccaccgcgaggtaggcgccgagctgctcgacctcgccatcgtcgatcggcgcaccataggcctgctgcattttcttcatctcggcggtccactgcgtcaggctcaggccgggcggctggtaggagacgtagtcggccgaatggcagatcgcgcatttctgcatggcgatgccgtagccgggcagcttggcgggtttgagcttgacgttctccgccggcagcttgatgtcctggggggccgcggacgcgctgcccgcgcccagcagggcgagcgcgagcagcactggggtgatggatcgatgcatggtgcgctcctcaggcgatggtgaccggcgtggattcaatgacgttgcggcgatagccggccgggttccagttggccttggcgggctgcacctcgccctggacgctggtggcgcgcaccatcagcaccgccgggcccttgcgcgcgaacttcaccggcagttgccaggcgcggaacgagaagcgccccaggtcctggcccagcgtcgcggcctgccagctctgcccgccgtccaccgagacctcgacgccgcggatgccggagccgccatcgaaggcaatgcctttcagctccaccgtgcgcccggcgggcagcacgccgccggcgcccacgctggtgatgaagctgcgtaccgccagcgtcgagatcggtcgcgtcttgctggcgggggtgcccggcgccacgcattggcagtcgttatccggtacgcgatagcccttggtcatgaagaacgcatcatggccttcgaacgggtggtccagcacctcgatctcggacaggtgtttgatccagtaggtgccgaagtagcccggcaccaccagcttgacggggtagccgttgagcagcggcaggtcttcgccgttcatgccccaggccagcatcggctcgccgttcatggcatgggcgatatcgagcgacttgcggaagtccggcgtgctcggcaacaccggcgtatccatcccgttgaacgtgaccaccttggcgccggccttgacgcccgcgtgctccagcaccttgcgcagcggcacgccggtccagcgcgcattgcccattgcgccgttggcaagttgggcaccgaacacgcgcggctcggagaagccgcggctgttgcctgaacactggttcacggcgacgatgtccaccggatcggccagccgcttcagttcatcgagcgacagcttcagcggcttgttgacgtggccgccgaccgtcaggcggaaggtggcaaggtctacagacagcggaatgttggccaggtggtagcgcacgaagaaggcgtcgttggcggtgatcggcccctcgttgaacgcggagaagggcgtctcaaggtgtggcggccgggtgctgacgcgcaccagcgggcgcttgcccggatagcgcaccagcgggcgggggccgtcggccagcgtgacgccgtcgctgatgcgcgcggccagtgcgccgagcggggtggcgccgagggcgagcaggcccgcgccctggacgatgcggcgccgggccggcagcggctgggcggggtcggcagattccgccggactgttcttgtctcgcatggggcgtctccttcaggggcttgttgtgtctcgcaaggcgctatggcgggtactttgaggccgcggcatcaacttgtgaaacgtgttttgctgctagcacttatcgattgaatcgatataggggaagaccacgggcgttccgccgagaaaccgcttgcatcgcgaattccatttccctacacttaccaaaacgtttttgtttgcggaaatcgataatatctgaggcgaattgcgcacagacgcagcaagtggcttgcgagccaccggcacaaacgctcacacaccaaacgaggagcaaagcatgtcccaccccgcccccgcgccggtggatgaacggctgccatggcggcgcctgtttgtcttcgggcttcaacacgtactggtcatggccgcgtcgccgatcgcgtccgtcttcctgatgagcaaggcgctgaacttcccgcccgcgctggcggtgcagctgctgagcgccacctttgtgatctgcggcctcggcacgctgttgcagtcgctgggcaagcgcggcatcggtgcccggctgccgttcgtgatgctgcccggcggcgccccgatcgtgctgtttatcctgatcgcgcagcagaccgacgtgcagaccgctgccggcgcggtgatcctgaccggcgtgttctacttctgcgtgctgccggtgttccggcgctgtctgcgctatttcccgccggtggtggtggggacgatgctgctgctggtggcgatcaacctggcgcaggtatccggcaagctggttgccggccacccggccgcgggcagcacggtggacccgctcaacctgctgctggcgttcgccaccattgcctgcaccgtggcggcatcgcgcctgctgtcgggcatgctggcgcagctggcgatcctgctggggctgctgggcggtgcgctggtggccgggctggccggcgcgttccagcctggccatgtgtcgatgtcgcccgtgttcgcgttgcccacgccgttcccgttcgggtggccgcatttcgatgtggtggcggcaatcccgctgatggtgttcgccgtgatctcgatggtggaggccaccggccagacgctggcgatcagcgatgccgtgggccggccggttgaccagcagcgcgacgtgccgcgcaccatccgcgccgatgcgctgacttcgctgctgggcgggatgttcggcacctcgctgatcatcaccagcggcgagaacatcggcatcgtgcgtgccaccggcgtgcgctcgcgcttcgtcacggcgatgtcgggcgcgatcctggtggtgttcgggctgctggtgccggtgtcgtcgctgatcagcgcgattcccgaggccgtggtcggcggtaccgggctggtggtgttctgcatcgtcggcaccatgggcatcgacatgctgcgcaaggtggacctgcgcgaccacgccaatatgtacgtggtggccgtggcgctggccgtgggcctgctgccgatcctggtgcccggcatctatggcggcctgccggccaatgtgcgcatcctggtgggcaatggcgtggccatgggggccattaccgcggcgctgctcaacttcctgtttttccatacgggcctgcgagccgcggcagcgggcgcggttgcccgcgacgatgccgccgccacgcattgacccggcttcctgaattgcaatgactgatcgttctgactcgacgccggcctggcccggcgataccaacccggccctggtgccggacagcttcaggcagccgcgcatcctgctgccggaatggaccttgctgcgccagggcacggtacgcggccacgcggtggtggtggagggcggccgcttcacggcagtgggcacggccgcggaagtcgccgcgcgcttccccgagctggaaaccctgccgctgccgcgcatgctgctgatgcccggcatgatcgacacgcaccaccacctgacgcagtcgttcggcaagtcgctggtgttcggcgaaccatcggagatcttccggcgcgtgtgggtgccgctggaaggcagcctgaaggcggagcacctgtacctgtcgtccaagctggcggcgctggaagcgctgcgcggcggcttcaccaccgtggtcgatgccggcacgcgcagcgacgccgggctggatgcggtcgcgcgcgcggtcgccgatgccggcgtgcgctgcgtgctgggcctgatctgcaacgacaagcccggcgccgaaacgctcgacgccgcgccgatcctgcgccgcgccgccgcccacttggacaagtacgccagcgatccgctggtggccccgtcgctggcgatctcgattcccgaggtggcctccgacgcgatgctgcaccacgtctaccagttgtgcgccgagtccggccgcatcttccagacccatgccaacgagcacctggtggcggtggagcgctcgctcaacgcctgcgggcgccgtccgatcgaacatctcgccgcagtcggcgcactgggtccggcggcactgctggcgcatgccacgctggtgacgccgcaagagatccgcttgctggccgacaccggcagcgcggtggcttacaaccccgtggccagcgcctggaagggcaacgccgtggcaccggccgagaccatggctaccttcggtgtgcgcctgggcctgggcaccgatggcacccgcagcgacggcttccgcctgctggactatgccgaggccgcccagcgcttcgccttcggcatcggcgtgggcgattcctcctgcggcgcgggctggcgctgggtcgacatggccacgcacgacgcggccgatgtggcgggtctcggtgcgctcaccggcgagatcgccgcgggcaagcgcgccgacttcctgctggtcgacctggacgtgcctgagctgacgccgtcctgggacctgacctgggaactggtgcgcctggccaaccgcgaccagatccgcgcggtctttgtcgatggcagcctgcgcctgtggcagggctggcccacggactgggacgcacgcgcgctgatgcgggcgatccacgccatggccgaggacaccgtcgccaacgccccgatccgcaagctgcatgaagccgcggacgtgcaccgagtccgccatgccggcacggaggcatcctgaccatggacatgacgttgttcagcgtcggcgtggcggtctttaccggcgcgctggtccagggtgcgaccggcatgggcttcgcgctgatcgtggtgccggtgctggcgctggccgcgccggcaatgctgcccggcgcgctgctgctggcgatgctgccgctcaacgcctatgtggcctggcgcgaacgccatgccatcgatatgcgcggggccggctggatcagcgccgggcggctggccggcaccttcggcgggctgtgggtgctggtggcgatgccgatggcatggctcaacgcgctggtcggcggcagcaccattgccgcagcggtggtgtcattgctggcgccggcctttacgccggggcggctgacctttgcctcgaccggcctgatcaccggcgtgaccgagaccgcaaccggtgtcggcggcccgccgctggcgctggcctaccagcatgcgccggtcgcgacgctgcgcgccaccgtggcgctgtgcttcctggtcggtgaagcgatctcgctggtggtgctggcgctgagcgaccggctcggcatggagcaggtgctctatgccatcgggctgctgccggtgctgatggtcggcatggtggccagccacctggtgcacaagcgcatcaaccagcgcatgctgcgcatcggcgtgctggtgtttgcgctggtttccggtgcggtggtgctgctgcgcggttagtgtcctagacgcctggcgtggacgatgcccgcaccaccagttcgggcgcgggcccggtgatcacgtcgcggctgcggtcgccggacaggtgtgcgaacagcagctccacggccagcgatgccacgcgctccaggtgcaggttgaccgcggtgatcggcggctgcgcgctgcgggcgcggatgccgtcatagcgcgtcaccaccagcacatcgtcgggcacgtgcttgcccagcgcttgcaggtgggccatggcgcccaccgcaaacgcatccaccggcgcgcacagcgcatcgagcgccggcatctgcgccagcaattgcgcgcaggcgtcggcgcccgcggcttcgccgtgttcctcggctgccttgacgatatggcagggcaggcccattgcctgcgtgaactcgcggtaagcgcgttcggtttccacatacgactggcgcggcgccgcgccgatcatcaggccgatatgccggcgcccgtgcccgtgcaagtgcgccagcagcagccgggcggtgtcggccgattgcaggtcgacgcaaggcaccggcgtgtcggtcagcggctcgcgtccgatcgacacgatgctgacgccgcgctcgcgcagccgcgcgatatgtgggtcgcccgcaatcggctcgatcacgatcgcgccgtcgatatccaatgtatcgagcaggccccccgcgccttccagcggtggcaccagcaccacgcccaggccgcgccccattgccgcctcggcggcaatcgccgccacttccatcatgaagccgagccgcgatgtgccgcccgccaccgcgaatggcatcgacgacaacagcgcgatgcagttggcgcggcccgactgcagccgctgcgcgcgcacgctgggacggtagcccagctcggcggcaacgcgcttgacgcgcgcacgcgtggccgggtccagcacgccacggtcgttcagcgcgtgcgacaccgtggtcagcgacacgccggcggcgcgggcgacgtcatggatggtgatgcggcgagggcggtctggcgtggattcggtcatgcgggacacgggcgatggttcagggcggagcatacaacagcgcgcggcaaggggcaggctcagcggcgcgcgttggcaccgccagcttcggacgacagcgctttccagtgttcgcgcgtgaaccgatagagcacctccagcgccggcgacagcgagcgcgccgccatgcgtgcaatgccatagcggccgcagcggcgcggatcgggcggcatcggcacttcggccatcagccccgcggcgcgctcctgccgcgtgatcgagagtacgccgaacagcagcgtatcgctggccagcgtcacgctgcgcagcatgtcgaggttgtcgcaatgcagggtgaagagcttgtccggcgcggcgcccggcccccatagctccgccagttgccggctgatgacggtgctgagcgtggtggttgccaccgggtaggcgcggatggtctcgatatcgatgcggcgcttgcgcaggatcggatgcccggcgcggcatacaagacctgcgggcaattcacccagtggctccacgtcgatgtcgtcggccgcacgcagcacataggcatcgccgacgatggcgtcgatggtctcgttgcgcagggcctccagcagggcgctggtggcgccgctctcggtgcgcaccttgatgcgcgcgtgggcctgcgccatgtggatcaggaacggcgtcagcagcagcgccgccggcgcgggcgccaccccgatcgtcagcgagccttcctcggcgccgcgcagcaggtccaggtcgcgccgcaactggcgttcttccagccgcatgcggcgcgcgcgttcggccaccagttcgccgaacaccgtcaggcgcgcgcgccgcgcgccgcggtcaaagagcggcgccttgagttcgtcttccagcgcgcggatgctgcggctcagcgccggctgggtcaggtgcacggcacgggccgcttcggagaacgtgccgtgctcgaccacggcgagcaggtgcagaagtttctgtgtgtccatgcggaaaaccatgcgcgttggttatgggagcggttcaacatttgcatttgaatcatacccccgcgctccctatgatgaccggaacacaagagcgggccggtgacagcacacacggcgtccgccatccaccgtccatcggaaatcggagagacatcatgctcaagctgtttatcggcctaggcctgccgtttatcggcgtcatcggaatgctgccctgggtggcggctgtcgagcgcttcgtgctcggcgtgcccttcatctacgcctggatctttgcctggttcgtgctgacctccggctgcatgctggcgtgctggctgctgttcgaccgccacgccgccgacgcggcgcatgaagcctgaagggagaccaccatgaccacagcggtattcgtcggcttcattgtcttctcgctctacctcgccatccgctcgaagaaaggccacggcgcgcagagcgtgcatgacttcttcgtggcgtcgcggcagttcggcgcctacctggtgttcttcctcgcggcgggcgagatctacagcatcggcacgatggtgggctttcccggtggcatctacgccaagggaccgacctacggggtctggttcctcggctacatcctgctggcgtatccgctcggctatttcctcgggcccaagatctggcaggcgggcgcgcgctataacgcgatcacgctgccagacctgttcaagggccactatggcagccgtgcgctggagctgatcgtggcgggctcggcgatcctgttcctgctgccctggggccagctgcagttcaccgggctggtggcggcgctcaaggggctgggctgggagttcgagccggtgtacctggtgatgatctcggcggcactggcctttacctacattgccatctccggcgtgcgcgcatcggcctatatcgccatcctcaaggacatcctgatggtggtggcgatcgtcgtcaccggcgttgcggtgggctggaaggcgggcgtgggcgaagtgttccatgccgccagcatgcaggtcagcaaccagatgaatgacacccagctgcgcttctcgatgagcaccatgctgttccaggcgctgggcttctacgtgatgccgttcgcggtgcagaacttcttcacggccaagagcgccaacaccatccggcgcacgcaggtggcgatgccgctgtacatgctgatgtatccgttcctggtgctggcgtcgtactacgcgatcagccagaacctgcagctcgcctcccccaacgaggccttcttcgcggccgcggtgcggctgttgccggactggctgctcggactggtgaccgccggcgcggcgctgtcgggactgctggtgctggccggcatctgcctggcgatcggccccatcgtcacgcgcaacctgctgccgggcatgcccgaggcgcgccagaagcagggcgccaaggtggtgattgtgatctacctggtgctgtcgatcgccatgacactggccacgccgaacctgatgctgacgctgatcaataccacctactacggcgtgacgcagttcttccctggcgtgctggtgatcctgttctcgctgaaggtgcgtccgctggcgattgcgctcggcatcgtcaccggccaggcactggcgatcgcgctgtatgtgcagcaggtcgacttcggcggcatcaacctcgggctggtcagcctgggcgtcaacctgctggtgaccgcgctggtgaactacacgccccgactggcccgcgtgcaggcggcgtgaatgaccggaatcatgcaatccatgacacaagacgacacggcgcgcacgcaggtattcgtggcgcgcaagatcctcacgatggaagccggccagcccgaggcgacacatgtcgcggtgcgcgacggcaggatccttgccgtgggcggcgccgccgagatggccggctggccggatgcggtgcaggtcgataccttccgtggcaaggtgctgatgcccgggctggtggaaggccattgccacctgatggaaggcgcgatgtgggatgcggtttacgtcggctacttcgaccgccgcgatccggacggcaagctgtggcgcggcctgcgcacgctggagcaggtgatcgatcgcctggcgggcgcggcaagccagatgcatgacccggacacaccgctgctggcctggggcttcgacccgatctatttcggcgccagccggctgtcggtgcgcgagctggatcgcgtctcggccacgcggcccatcgtggtgatgcatgccagcgtgcatctgatgaacgtcaattccgcgatgctggcgcgggccggcatcgacgaggacaccgatatcgacggcgtgcacaaggacgcgcggggcttgcccaccggcgagctgcaggaattcgcggcgatgttcccggtgcagcgcgtgcttggcagcggcctgtcgctggcggcggccgagaatgccgacgcggtgcgccgcttcggccgcgtggcgcaactggcgggcgtgaccacggcgacggatctggtcaacgacctgtcgcccaaggggctggagacgctgcaggcggtcactgccgaccccggcttcccgctgcgcatcgttccggcgttctcgccgcagcgcaatgcgcagggcggccccgcccgcgtgcaggccgcggcggcggccggcaccgacaagctgcacttcggtccggtcaagttcatcgtcgacggctcgatccagggctttaccgcgcgcttgcgcgcgccggggtatgccgggggccaggccaatggcttgtggctgatcccgccggagcaactgctcgacgccttcacgccattccacctggccggcctgccgctgcatatccacaccaatggcgacgaggcgacgcaagtggtgctggacgtgctggaagccatgctgtcgcgccatccgcgcgcggaccatcgccatacgctgcagcactgccagctggcggacgaggcacagctggcgcacgcggcgcggctgggcctgtgcatcaacttcttctccaaccacctgtactactggggcgatgcgcatgccggccagaccgtgggaccggcgcgggccgcgcgcatgaacccggcgggcacggcgcggcggctggggattccgttcgcgatccattccgatgcgccgatcacaccgctgaacccgctctttacggcgtggtgcgcggtgcagcgccagaccgcttccggccgcgtgctgggcgaagctgagcgcctgccggccgccgacgcgctgtatgccatcaccatgggtgcggcctatacgctgaagctcgatcaccgcatcggcagcatcgcgcccggcaagctggcagactttgccgtgctggaagatgacccgaccgaggtggctccagagcgcctgaaggatgtgcgtgtctggggcacggtgctgggcgggcgcgtgttcgcggcgccggcacgatgaacgcgcgggctccggtcccgctggtggtggtcggcgggtaccttggcgccggcaagaccaccttgctcaaccgcctgctggccaacgcgcaggggcgccgcatcgcggtgctggtcaacgatttcggcgagatcaatatcgatgccgcgctgatccgcacgcgcagcgacgacgtgatccagctggagaacggctgcatctgctgctcgattggcggccggctggccgaggcgctggtggccatcgcagcgcgggagcagcggccggacttgctggtgatcgaggccagcggcgtctcggacccgcagcgcattgctcaggtcggcttgctggatcgggcctttgtgctcaatgccgtggcggtggccgtggacgtgaccgaggtcggccacaacctgcacgatccgctggtgggcgacatggtgcggcaacagatcgcgggggcctcggtagtggtgctgaccaaggcagatcttgccgatgcggatgcgctggcaatggctgccgccacggtcgacgccatcgcgccgcatgccgcggtgctgaccgcatgcgagggcgaggtgcccttgtcggtctttgtcgacgccgccccgccggaaccacatgccgatgccgtgctgcaggcgggcgggcactggcggcgagccgtcggcaccgtgcccgccggcatccgcagcatttcataccagaccggccgcgacttcgacaaggcgctgctgcggcaggcgctgaaggcgctgccggtgcggctgctgcgcgcgaagggcatggtcaggctggcagccgatccgcgcctgcacgaactgcatgtggtcgcgggccgcatgcggctgagtccgatggcgcaaggcgatgcggcagggtctgcaatggtcctgatcggtgccttcggtgcggaggaggagaggcgtatccgcgcctgcctcgatcgggcgctcgcctgagcgggcgcgcgaacggcgtcgctgcggcgccgctcaggtgtggaattcttccggttccgcatgcgccggccttccttcccagccgccacgctcgaactccgcaatcacctgcgccccaaacagcagcaaggtcgccgcgatctccaggctcagcagcaccacgatcgccgtggtcagcgaaccatagacccggctcacttgcgacagcgtggtgaagtaccacgccagcacatggcgggagatttcccacagcacggccgcaaccaacgcgccgctcagcgcatgccgcagcgacagcctgccaaccggcatcaccatgtagatcgaggtcagcatcagcacctcgccaatgaagccgagcaggtagagcaggccggtcgagagccggtccagcgaccagtcgcggcccagcacttccacatgccgttcgccgatggcgagcaggccgcctgacaccaccgtgaccagcagcaggcccacgctaagtaccgcgatatagcagtagggcagcagcgccgagaccaggaaatgccggcgccggatcgccacgcggtgctcgaagatgaccgacatggcattctccagcacggtgaaggcgagcgaactgaagaacagcatggtgaccagcagcacccagccgatcgtgccacggttgcgcaggaaggcggcaagctcggtgatcagcgccctggactgccccggcaccacccactccaggtagcgcgcgagcgtggacaacagcaggtctggttcgatcacgtgcgacagggcaatgatcatcaggatcagcagcggcacgatcgacagcagcgcgtagtaggccaccgcgccggccagcagcagcccctggttggcgcggaactgcctgagcgtgtgccaggcaaagcgccccggatggcggagcaggtcacggacgcgggcgtcgggaagctgcatggcagacatcggagaggaaggggtttcgccattatgcggcttcgatgcctgacattccaccgggttatggctctattccgaatgcatcattgtggtcggaatccgcttcctccaagatggcgcccgcggcctgcaccatgcgggcttgcacctcatgcatacaaggcggcgcaccgtgcgtgcaaccgcctggacaggaatggagacagcatgcaagcgcaaacagtgtcgcgcaggacgggattcggacgcagtcgggtgtggctggccgtggcgctgctggtggcgccgatgagcgttgcgctggcgcagggcaccggccagcctttggccgttgccgaggacgaggtcatgcagggctttccgccgccgcccgacaagcaggtcagccgcggcagcgggctgcgtccgccgtatatgcgctgggcgttccggcatgcgcgcgagatgtcgccgacggcgggcatccggcatgccagccagccgctggccctggccggccagcccggcacggaactggacggcaccacctttgccgtggccggcaagacggtccgactggccgactacctgcgcgacacccataccgacggctttatcgtgctgcaccagggcaaggtcgtctatgagcgctacctcgcgggctttggtccttaccagccgcatatctgggcctcgatgaccaagtccgtcaccgggctgctggccgccatgctggtcgaggagggcaagctcgatccgcaggcccggctggcgcagtatgtgccggaactggccggcaatccgttcggcgaggccacggtacagcagaacctggatatggaggtgccggtgggctacccggaggggctgccgccggacctggcgctgttcggggcggtggggatcgtgccgcgcaaggcggaggcgccggacaccatctatgacttcctcaaggtcgtccacgccaccggcgggcgcgacgatggcggcgtctggtactaccagaacggctcgccggaagcggtagcatgggcgctgcgacgcatcaccggcaagagctgggcgcaactggtgaccgagcggctgtgggcccgctttgccgacgatgatgcctacacccaggtggaccgccagggcacggaaatggccagcggtggcatgaattccacgctgcgcgacgccgcccgctttgccgaggccgtgcgccgggcggccgcgggcgacgcctcgggcgggatctcgccggcggcggtgcgcattgcgctgcagccggccggcaaccaggcccgatttgcgcgcggcaacaccatgccgggccgcgacggctatggctaccgcaactactggttccagcgcaacgacggcgacggcagcatcgaggccagcgggcgcttcggacagaagatctatatcaatccggccagggggctgacggtggtgaagttctccgccagcccggacggcgccgcgcgtgcgaccagcgcagccgcggtgcgcaagcgcgacgatccggcccgggcgctggaatccgccgaggccatggtggccgctgcgctcgcgatccagcgcgcggtcagccgctgagccacgccggcagaggccggcagagtctcccgatctggactaggccggcgtttccgccggcacctgcggtgcccccgccgcccgccgcaggcaatccagcatggccatgaccgccgcgcgagactgcgcgtcgtcacgccagtacatcgacaccgagccgaaccccgccagccgcagcggcacgatgcgcagcgcgcccagctcttccagcctgcgcgcggtgcggtgcgaggccaggccgatcatgtcgctgttgttgagtagcgtgagattcagcacagtggaattgctctccacgcaatcggccggcagggcacgctcggcgctggccagcgcgccttccagcgcgttgcggatgggcgtgccgcgcggccacaccacccagcggtggcgatacaggtcgtcccagccgatgcgcccgccttgaagcagcgggtggcgtggccgggcgacgaagtggatcggctccatgtagagcgattcggtgcgcatgtgcgcgtcctgcagctcgggcgccgagcggcccaccacgatatccagctcgctgtgcgccagctggctcatgagccggtccatggtcgtttccaccagccgcacgctggcgcggggcatctgctgcagcaattgcagcgctgccagcggcacggtatccgccgacgacgcgcccgacgtacccaccaccacgatcccgctgccgccgtcgcgcatggcctgcaggtcgtcgcgcgcggtatccagctgggcctcgatccggcgggcgtgctcgatcagcgactcgccgtagggcgtgggccgcagcccgcgcgcctggcgctcgaacaggggcagcccgatatcgtcctcaaggtccttcagccatttggaaagtcccggctgggtcgtgttcagcatggccgccgactggctcatattgccggtctcggccaggctcagcagcatctgcaggttgcgcagccgcaatctctgggtccagtccatgaagctacctatataaaaaaacgtatcgataagatgaaaagttcatttcaaatcttatagggccgggcgtataacgacaacaagacggtgcgcatcgacacaggcacccgcaaagagcgctccccaaagcacctgcaaaagtcacggagacagcatgtccgaacacaccccagacccggcccgcgtggcctattacgaagaaatcggccgcagccacatgaccccgctgtgggagtcgctgcacgcgctggtgccgccgcaaccgcggccgcagatcgttcccgccatctggaagtacgcccagatccgcccgctggtgatgcaggccggcggcgtcatcagcgccgaggaagcggtgcgccgcgtgctggtgctggagaacccgggcattcccggcaagtcgagcatcacctccacgctgtacgccggcctgcagctgatcctgccgggcgaaattgcgcccagccaccgccatacccagtccgcgctgcgctttatcgtggaaggcaagggcgcctggaccgcggtcaacggcgagcgcaccaccatgcatcccggcgacttcatcatcacgccgtcgtggacctggcatgaccatggcaaccccgccgtcgaggacggcggcgagccggtggtgtggctggacgggctggatattccgctggtgcagcagttcgatgccgggtttgccgagaactacccgcaagcccagcagcccgtgacccgcgtcgagggcgacagctttgcccgcttcggccataacatggtgccggtgcggcaccgcgtgaccgatcccacttcgccggtcttcagctacccgtacgagcgctcgcgcgaggcgctggaccagctctaccgcaacggcgagctcgatgcctgggacggcgtcaagctgcgctatatcaacccggccaccggcggctggccgatgccgaccatcgccaccttcatgcagtacctgccggcgggcttccagggaaagacctaccgcagcaccgacgccaccgtctacagcgtggtggaagggcgcggcacggtgcgcatcggcgacgaccagttccagttcgagccgcgcgacaccttcgtggccccgtcgtgggcgccggtgcagctgggcgcgctggaagacgcggtgctgttcagctattccgaccggcccgtgctgtccgcgatgaacctgctgcgcgaagcgcgcacctgagcgtctcgcgaccctgatccgacctgccccgggcggtgcctgcgcgcaccgcctgaggctcccgcttacctgacgacttccggaaacctcgaaccatgtcctacgtcttcacgccccccgccaccgtttccatccccgttgccggcagcgacgaccagttcgccgtgcgccgcgtctattgcgtgggccgcaactacgccgcccatgcgcgcgagatgggcttcgatcccgaccgcgagccgccgttcttcttctgcaagccggcggacgcgatcgtcccggtgcaggcaggtaccacgctggacctgccgtatccggcgcagacgcagaactaccactacgaggccgagctggtggccgtgatcggcaaggctggttcggatatcccggtcgaacaggcactcgaacacgtctggggctatgccgtcggcctcgacatgacccgccgcgacctgcagatgaagatgcgcgaaatgggccgcccctgggaaatcggcaaggccttcgatgcctcggcgccggtcgccccgatccaccgcgccagcgagatcgggcatccgcagcaggccggcatctggctgaccgtcaacggtgacacgaagcagcgcagcgacgtgtcgcacctgatctggtcggtagcagagacggtggcctacctgtcgcagttcttccgcctggaaccgggcgatgtgatctttaccggcacaccggaaggcgtgggcgcggtcaaggccggcgagaccatggtcacgggcgtggacggcctcggcgaactggccgtgcgcgtggtctgaacctctgaatcgcagcacaggcattaccgatcatgcagctctatagtttcttcaacagctccacgtcctaccgggtgcgcatcgcgctggccctcaagggcctgccgtacgactacctgccggtcaatatccgcaccggccagcaccgcgagccggaatatgtcggaagcatcaacccgtccgcgaccgtgcccgcgctggtggatggcagttttgcgctcggacagtcgttcgcgatcatcgactacctggacgcgctccagccggtgccgcgcctgctgccgcaagacccggtgcagcgcgcgcgggtgctggaactggccacgctgatcggctgcgacatccacccggtcaacaacctgcgcgtgctgcgctacctgcaggacgtgctgaaggtcacgcccgagcagaaggatgcctggtaccgccactggatcgatgaaggcatggccggcgtggagcgcctgctggcgcagcacgggcatggcaggtggtgcttcggcgatgcgccgacgctcgctgacgtcacgctggtgccgcaagttgccaacgccctgcgcatgggctgcgacctgagccggtaccagcgcgcgatggcggtctacgcacacgccagcgtccatcccgcctttgcccaggccgcgccagcgcaccagcccgactacaccgcctgacgccaccacgcaggccaggagacaagcatgagcagtaccaacaacgcgaccggcaaggtcctcatcatcggcggcggcatcggcggcctcgccgctgcgctggcgctcgcacgccagggcatccgcatcgaactgctggaacaggccgagcagatcggcgagatcggcgcgggcatccagctggccgccaacgcctttgccgcactggatgcgctgggcgtaggcgaagctgcgcgcagccgggctgtctttaccgactacctcagcctgcgcgatgcgatcgataccagcgtgatcgccgaggttgacgttgggcaggcgtatcgtgaacgcttcggcaacccctatgcggtgatccatcgcgctgatatccacgtgtcgatcctggaggcggtgcaggaccatccgctgatcacttttcgcacgagcacgcgcgtggagcggttactgcaggacgacaagggtgtgaccgtgatcgaccagcacggcgagcatcaccatggcgacgcggtgatcggctgcgacggcgtcaagtccgccatccgccaggcattgatcggcgatgagccccgcgtcaccggccatgtggtctaccgcgccgtggtcgacgtcgccgacatgccgcaggacctgcaggtcaatgcaccggtggtgtgggccggcccgcactgccacctggtccactacccgctgcgcggcggccagcagtacaacttggtggtgaccttccacagccgcgagcaggaaacctggggcgtgcgcgacggcagcaaggcggaagtgctgtcgtacttcgaaggcatccatccgctgccacaccagatgctggaccggcccacttcctggaagcgctgggccaccgccgaccgcgacccggtcgagcgctggagcttcggccgcgccaccatcctgggcgatgccgcacacccgatgacccaatacgtggcccagggcgcctgccaggcgctggaagacgcagtcacgctgggcgccgcggtgcaggccgccggcggcgactacgaggcagcattcaagctgtacgagcaggcccgcatcccgcgtaccgcgcgcgtgctgtacgccgcgcgcgacatgggccgcgtctaccacgccaagggtgtggaccgcctggtgcgcaacagcctgtggactggccgcacgcaggcgcagttctacgacgcgctgcagtggctgcatggctggcgtgccgaccagtgcctgagccccacgccgtggctgtaagccgctgtcgcagcttttcttcgcagtcaatccgtcgatctggcggccgcgcataaggcagccggacgtgactcgcccctaatcctggcatcaaggaggagaccaccatgcctgccagccaacccctgaacgtcaccgcgttcatcgaccgccagccgctgtcggcgttccaggtgagcatcgtcgtgctgtgcttcctgatcgttgcggtcgatggcttcgataccgcggcgatcggcttcatcgcaccagccatccgcgcggaatggcagctgacgccggcccagctggcgccgctgttcggcgccggactcggcggcctgatggtcggcgccttcctcttcggcccgctggccgaccgcttcggccgcaagggcgtgctggtgctgtcggtgctgttcttcggtgccgccagcctggcctcggcctggtcgcaggacctgtggatgctggtgctgctgcgcttcctgaccggcctgggcctgggcggagccatgcccaacgccatcacgctgacctcggagttctgtccggaaaagcggcgctcgttcctggtcacgaccatgttttgcggcttcacgctgggctcggctttcggcggcctggcttccgccgggctgatcgatgcctttggctggcgctcggtgctggtggccggcggggtcatgccgctggtgctggcggcgctgctgctgtggctgctgccggaatcggtgcgctacctcgtgctggccggcaagcagcgcgaacgcatcgtcgccacgctgcagaagatcgcgccgcaagccgacctgcgcgacgccaccttcgtggtcggcgaacagcgcagcaccagctcgcccgtgcggcacctgttccggcccgagctgctgcggggcacgctgctgttctggctgacgttcttcatgagcctgctggtgatctacctgctgtccagctggctgccgacgctgctgcgcaccgcgggccattcgctgcgcacggccgcgctggtgacaaccatgttccaggtcggcgggacggtgggggcgattgcgctgggttggctgatggaccggatcaatccgcactatgtgctggcgtccagctactcactggcggcgcttggcatcgcggcggtgggcagcgttgcttccgagccggtggctgcgggcatggcggtgttccttgcgggcttctgcgtctcagggtcgcaggtgggtgcgaatgcgctgtcagccagcttctatccgaccgactgccgtgccacaggcgtgagctgggccaacggcgttggccggatggggtcggtggtggggtcggtcggcggggcgacgatgctgtcgatggggttggggatgccggcgttgtttgcactgatcggcgtgccggcactggtcgcagggttgtcgatgttctcgttggggatggtcaggcgtcagagggcggtggagcgcctggcagtctgaaggcgggcggccgcgggagccattgactgagggggaggcgcatggtcggtcgtcgggaacacgctgaccgaggtcttctgcaacaccgtgtgatgcgcggccggctgcctgcgccatcagccgaacaccgcctcccagtcgacatcccccttgtcgcgcggcccgaggttcagttcgcgttccacgtgatccaggtgcgcaagcatccgcgcgcaggcggtagcggcatcgccagcctcgatcgcatcgacgatgccggagtgctcgtcatccgggcaagccggtgcgttcggtgcgttgtagagcgcgatgatcaggcaggtgagcgggcaaagctcccccatcagcttgatgaaaaaactgttgccgcccagctctgccagcagcatgtggaattcgcccgtgagcttgatcagggtgcgatgatcgttatccgcgcgggcgcgggcctccttggccaggtgttggcgcaggcggcgtagcccggccttgccagcgcgcgcgaccacattgcagacaatgtcacgttcgaccacgcggcgcgccgcgaacaagtcttgtgcttcctgtaccgacggactggtgacataggcaccgcggttcggatgcagctgcaccagtccttccttggccaggaccgtcaaggcctgccgtatcttcgtgcggctgacgcgaaaagccagtgcgagccgttcctcggccagcttcatgccaggcgcaacgcggtgctccatgatggcctggctgatgcgttccgcaatggaaggcgcctctgcttttgcggccatgctttgctgggtcgtcaacgttatctgctcgataggtggagaagtggcgcctttttgcccgcatccgggatgctggtgaaggcaatccggatgccaggcaacggctggaaatattgtatacaggttaaaacgggccgcccacaagagccagcacaagaaaacaagggatttccctcttcgtgtttcggccgttgggcgagatattcttaatggcttccatcatggttgtacacaattttgtgcactaaagtcgggcgaagggcggggcggagcgagtgcatgtggcacggcggcggtgcgggctgaccgcatgcccatgtccggcgtgggccaggcccgtgaccgggcagtggcccggaacttgcgtccgcgtgcggcaacgcaagcaaggggactcacatggcaggcaccacgaccaggacaagggaggccaggaaggaagccgcaacacgggcggtggcgcctgccgccagcgccgaccctccgtcacgggaagggcgggaatgccgggacggcgacagcacggtgcagtccctgacgcgcgcgctccagttgatcgagctgttgtccgatgacgacgagggctaccggctggtggatctggcggcacgcagcggcctgtctacgtcgaccgtccatcgcctgctgaccactctggagcagcgccagtttgtccagttcgatcgcgagcgcagcctgtggtacgtgggcgtgcgttgcttctcggtgggtgccgctttcgcccgccggcgccgcatcagcgaacttgccctgccggtgatgcaacggttgagcgcgctgtccggggagaccgtcaacctgggcgtggccagcgacgggcagattgttttcgcctgccaggcagagggcccccacggcagccgcgcgctggccaggccgggccagcgtgcgccgctgcatggcacggccatgggccaggcggtgctggcagccaagagcgaacccgacgtgctgcaatacctgcgcacctttggcttgccgcgcctgaccaacaacaccattgcgcgcccctcgcgcctgcatgagaccctggccgaagtgcgccggcgcggctatgcggtggacgacgagcagaatgcggtcggcctgtgctgcattgccgccgcgatttgtgacgagcacggccggcccttcgccgcggtctcgctggccggttccagccagcgcatcgtgcgtgcccgtttcgatgagcttggcgcctgggtgcgttgggctgccacagagatcagcgcagcctacggcgggcgctgcacccgcgtgccctgcccgatgccagtgcccgcagcgtccttgcctttccacgcgggcgcgccggaaagctgttgattcttaagggtttattcaagaagttccggcgtgcgggaaagccgccgcgcgggtctggccatgcgcttcaatggaagcaatgtcacgaccggcccccgcaccatgaagaccctgcttgccgataccccctggagccgacggcttgccgccggcattgaccgtatagccatcctgtgcggatggtggctgatcgtgctgtcggtggcgacctgcgtcgaaatgctcgggcgcaagctgggtggcttcagcttgcagggtatcgatgaaatcggcggctatacctacgccatccttggcgcgtgcggctttgcctacaccctggtcgggcgcggccatacccgggtggacttcctgctgacgcgctttccggtcaaggtgcgggccgtgctcaacctgctggcgatgctgagcctggctgcggtggccggactctgtctctggcgcgccggccatgtgctggtggacaccatcgacctgcacagcaccgcgtccacgccgcttgccacgcccctgtggatgccccagaccctgtggctggccggctatgccctgttcgcactggtggcggcctgcgctgcctggcacgccctgcagctgctggtgcggcgcgactgggcccgcctgaacagccagttcgggccgcagaccctggccgaggagatcgaggcggaggcggacatccgcgtcgccgccgcgcccgctgagggcaatggcgcaggccagggcagcgctgaaggcaagagcgaaggagcggcagcatgatcggtcccattgaaatcctgctcgggctgtgcctgatgctggggctgatgttccttggcttccatgtggccaccagcatgctggtggtgggcgtggccggggcgctggcctatttcggcatgccagcgatcgacgcattgggcgaacagttgtgggcagccggcgaggactacctgctgctgtcgatcccgctctatatcctgctgggcgagatcctgatgcgcggcggcgcgacggacaagatgtaccagtcgctcggcgactggctgaaccgcctgccgggcggcctgctccataccaatatcggtgcctcggccttgttctcggcggtgtcagggtcatcggtggccaccgcggcgacgatttccacggtcgcgctgccttccttccgcaatcgcggctatgaccagcgcatggtgctgggctcgatcgcggccggcgccagcctgggcaacctgatcccgcccggcgtggccttcatcatctacggctcgatgaccaatacttcggcggcgcggctgtatgtggcgggcgtgctccccggggccatcatgaccgtgctgttcctggccacgatcctgctgatctgcctgtggaagcccgcggcgggcggcccgcgcgaggcccgtgtgccgctgctcgccaggctgagcaactcgcgccacctggcgggcccgctgctggtgttcacggtggtgatgggcagcatctacaccggctgggccacggtcaccgagagcgccgcgctcggcgtgctggtgtgcctgccggtggcggccgcctacggcaagctcagcgtcgccatgctgcacgactgcttccgctccacgctgcgcctgaccgcgatgaccgcgctgatcctggtggccgcgctctacctgaacttcgtgctctccatgctgggggtgccgcaggcgctggccggcctgatgaagcaggtggacgtgtcgccggcagtgttgctgtggctgctggcagccctctacctggtgctgggcatcgcgctggagaccatgccgatgctggtcggcacggtcccggtggtcttcccgatcgtgcaggcggccggcatcgatcccgtgttcttcggcgtgttcatggtgctgatgtgcgagatctcgctgatcagcccgccgatcggcatgacgctctacgtgatccagggcgtgcgcggcgaaggatcgatcaatgaagtcttccagggcacgctgccgttctttgccgccatggtggtgatgaccgccgtgctgatccatttcccggcgattgccacctatctgcccaacctgatgttcgggcattgacctccaaggaagctcccatgaacgccaaacgaatcgccggcgcgctgatcgcggccgcccatgtcgcctgcgttgccgccgtgctgctgccgggcactgcccaggcacagcctgctcaaccagcccagcaaacgaagctgcgtgtagccggcaacctcgtcgcgaccggcctgatccagcagaacaaggagcagccctttttcgagaacttcgccaggaacaccggcctgccgatcgatgccgactacaagccgatggatgtgctcggcatcaaggattcagacggcctgcgcgtgcttcgctccgggctgttcgacatcgtcagcctgcgcctggcccaggtctcgcgcgacgagccattcttcctcgggccggacatcgttggcctgagcaccgactacggctcggccagcaaggccgtggatgcctaccgcaatgccttcgacaagcgcctgcaggaacgctacggcgccaagctgctcgggatctggccgttcgggccgcaggtggtgttctgcaagtcgccgattggcggactggccgacctgaagggcaagaaggtgcgcgtctatgaccagtccctggccaaattcatcgagaagctcggcggcattccggtgacgatccccttcggcgagacccagcaggcgctcgagcgcggcgtcaccgattgcgcgatcaccggcccgagctcggcgaacacggcgggatggcccgaggtcacctcatacttcatgccagttggcttccagatcgcgctgaatgcgtacgccatcaagctcagccgctggaacgcgctgccgcccgaccagcaaacgcgcctggccgaggccttccagcgtttcgagcgcgatacctggtcctactcgcgcgagttgttcgaggatgcctcgcgctgcaacgtcggcaaagagccgtgcaagaccggcaagaagttcgccatgaaggaggtgcccgtgcgtccggccgacctgcagctggtgcgcgacgcgctgaccacggtctcgctgccgacctggaccgaggtctgcgacaagtcttacccgcaatgctcggccatctggaagcagaccatcgggccgctggtcggggtcaagtgaacactgaggacggcggagacgacgatggatgagctttggaaactgccggcacatgcgctcaccgacggctacgccaccggccgcttcacgccgcaacaggcgctggcgtcctgcctggcgcgcacggcgcactgcaatccggcgctgaacgccgtgatcgcattcgatactgaaggcgccatggcggcggcacaggagagcaccgcgcgctggcgccgtggcgagccgctgggtgcgctcgatggcgtgccggtcaccgtcaaggacaacctgcacgtgcgcggcctgcccacgcattggggcagccgcgcgctggcgggctttgtcccggaccgcgacgaactaccggtggcgcgcctgcgcgcggccggggcgctgatcttcggcaagaccaatgtgccggagttcgccatgcagggctataccgacaacctcgtcttcggcacaaccggcaatccctggcagccggccctgacgccgggcgggtcttccggcggcgcggtggcggcggtggcatcgggctgctgcccgctggcgctgggcaccgacggcggcggctcgatccggcgcccggcctcgcataccgggctggtgggcttcaagccgtcgcccggccggctgccgcgcggcgatgggctgccagagatcttcatgcgctatgaagtggtcggcccgctggcccgctgcgtggccgatgcgatggccatggccgaggcgctgggccagcccgacccgcgcgatcccgattcccggcgctttgccggcgtgccgctgcagatgccgccgcggccatgccgggtcttgcacgtgccccggttcggcgatcatccggtggatgcgcgcatcgctgccttgaccgggcaggcagcgcaagcgctgcgtgaacttggccacacggtggataccgcgcaggcgttcgatctggctgaagcgaccaatgccaaatggtcgctgttgtcgcaggccggcctggcctggctggtggagcagggcggcgcgcaactgccgttctgcccgccgctcgatgcgggcacgttcggtgctgccacgcaggccaatgcatcggctggcgcaggcctgcgtgccgtgcagctgtttgatctgctgatggccgtggagcgtctgcgcagcgagctttccttgctgttcgcacgctacgacctgctgctgacgcccgccgcagcggcattgccatggccggccgcacagtcgcacccgcctgtgatcgaaggccgcgaggccgggccgcgtggccatgcggtgttcaccgcattcgccaatgctgccggcctgcccgcgatctcgttgccatgcggcgaggcagagggcttgccggttggcctccagctggtggcggcgccggccgaggatgcgttgctgctggcaatcgcgcgccagttcgagcaggccttcccgagggcgccgggattcccgctcgacgggcagggccgatgaagaccctggttgcgccaggtacgccggcggcgctcgcgcagatgctctgcgtcgcgcgtacgcgcggcgagcgcgtcgatccggcactgttgcacccgcttgcgcatggcggcagctacgccgtgcaggatgccacgcttgccatgatcggcccgattggcggctggaaggttggtgcgagggggccgggccaggaacccgcctgtgcgccgctgccggcggccggcctgctgccggatggcgtgggcctgcgggggccggcctggcgcctgcgcggcatcgaggtggaggttgcctttgtgctcggcgccagcctgccgccgcgcggccggccttatgagcgccgggatatcgaggccgcgcttgcgctggtggtgcctgccattgaagtcgtggaaagccgcctggaggactggctcggggccggcagcgatgcgcagctggccgacctgctcagccatggcgcactggtgacggggcgccccacgccgttcgcgcgcgagtggctgcacctgggcgcgctggaggccacgctgcgcttcggccggcgcaccgtggcgcataccgtcggcgggcaccagagccctgatgtcggcgcgctgctggtctggctggccaaccactgcgccgcgcgcggggcggggctgaaagccgggcaagtggtgaccaccggcacctgcaccgggctgctctttgcctctgccggaacccgcgtcagcgccgggatcgaagggctggggacgcttgcggcgtggttctgagggcgggggcttacggaacccagccaggcagctccgatgcctgccggacccagcttgccaccagcgcctcgtcaagctcggcgtcttcgtggatgtggaagtagcgtgtgttcttgtccttggattcgacagggggaacagggcgcagcgacatgccacggaagaaggccaccttgatgtacttcgtcatgcaatggaagctgaggaaccagccctggccctcgatgccatagaacggcgagttccacttcactgccttgcggacgttgggaacgttgcgctcgatgagcgcgtcgagacggcgcccggcgtcttgtttccagcccggcatggcggcgatataggcctgcacgggggcatctccgtcggccttcgcgatctgggggttgccgcctgcgagcaggggcgggctggcagcggcccgcctggccggagtcttcgttgcggcgtgcgccggcttcctggatggttggttcgccattgccttcactccatcgaatacacgctgaccacctgacagacaggccaagtcgcccagggcagacatagccgctgacgacagtgcttgaagcacgacaatcgggctatgctaacctgctgaagcggatcgggcaacgaacgagggatcgaccggaacgctctctgtcatggccggacgcgagctgcctcatgcgcgggaaaaattcgaggaataggcatccatgaatccatcggaacgtatcgacgagctgatcgcaggactcactgactggcgtggcaagacgctggcgaagctccgcaagaccatcctcgaggccgacggcgagatcatcgaggaatggaaatggatggggagcccggtgtggtcacgcgacggcatgatcgcggtcgccaacgcgcacaaggagaaggtgaagatcaccttcaccaacggggcgagcctgccggatcccgacaagctcttcaacgccggcctcggcggcaacaagtggcgtgcgatcgatctcttcgagggcgacaagattgatgcgcgtgccatgaagaatctcatccgtgccgcgattgcgttcaatcagggcaagtcgaagaggaaggcaccgtccgcggctacccgggcgaaagcacaagagagcaaagagtaaagggacacgaagcatcctggcgtgcgggcgcgcgcctgagcatcgcaaagaacgtcccgtccggcatgctccacgcatatggaatgccggttttcttcgttggttttcgcgtgctgcgcgcgtaggttcgtgggtttcaatctccccgcgaatgccatgaccgcttcccgacgacagttcctgcgccagggcgccgccgccacggccgcgctcgcctccggccccatcctttccttcaccacgttcgccaccggcaatgcacaagcgcaggggcgcccggtcctgaaagccggcgaccagaagggcggcctgcgcgcgctgctcgaatccgccaacgcgctcgacggcctgaactacgacattcaatggaccgagttccctgccgcggcaccgcttgccgaggcgctgaacgcgggcgcggtcgacagcggcccgatcggcgatgccccggcgatcttcgcgctggctgccggcacgcggatcaagctgatcggcgccaaccgctctgatccctacggcacggcaatcctggtgcggcccgactcgccgctgcggcaggcggccgacctgaaaggcaagagcattggcaccaaccgtggctcgatcggccacctggtgacgctcaaggcgctggaatccgcggggctgaagccggaggacgccaacctccgcttcctgccgccggcggatgccaagctcgcattgagcagcggctcggtggacgcgtgggcgacgtgggaaccctataccgcgatggcggaaaccagcggccacgcgcgcgtgctggtcagcggacgcgggctgtggtccggcctcagctacctggcagccaccgatgccgcgctggcggccaagcgcgcggtgctgcaagacttcctgcgccgggtggtgcgtgcgcagcaatggtcctaccagcacgtgccggagttctcggcggccctcgcccgcatcatcgggatcccgccgcaggcggcacggctgcagttcgagcggcggcacacgcaatggcggcagatcgatgccgaactgatcgccgagcagcagcgcacggcggatttctaccagaaagctgggttgctcaagcagcggctcgatgtgcggcagaccttcgactccgggttctcccttaccgcctgactgccgcgggcggcgccaggccgtgcactgagtccatcgacggcctcggcaagcgcctccggcacgaccatggcctcgccggaggccgctaaggatttccatgattgacgccgacccgcgccagcccatttcacggcctggcgcggcctgcgccggcgcggaccgttctggtcccagcgaatccgggcaactggtcctataggcccggaatggccctcacctataaagccgtgacccccaaacatatttcccgttccgaggagcaaaaccatgcggtggatcaagcagatagcgacgtatttcgccctggtggccgcgctggcgccagccgcacacgcccagagcaagaatgtagtaattgcttaccaggacatggtggtgccctggcgctacgcgcaggacatgaaggagctggaaaagcagaccggctacacggtctcgttccggcagttcggcggcggcggggacgtgatccgcgccatggcttcgggccagatcgccattggcgaggccggcacctcgccgattgcgtcggcgctgtcgcaagggctggatgtcgaactgttctggatcctggacgatatcaacgcggccgaggcgatggtcgcgcgcaatggcagcaagatcgccagcgtcgccgacctgaagggcaagcgcgtcggcgtgcccttcgtgtcgaccacgcactaccacacgctggtcgcgctggagcgcgccaggatcaatccgaaggacgtccgcatcgtcaacatgcgcccgcccgaagtagccgccgcctgggagcgtggtgacatcgacgccacctttatctgggacccggtgctggccaagctcaagcagtccggcaccgtgctgatgacctccggccagatcgccgccgacaccggcaaggccaccttcgacggcatgatcgccaacaagaagtttgcccgtgagaacccggagttcatggtcaagctggtgcgcgtgctggccgccgccgatgaaaactaccgcaagaacaaggcgtcctggacccccgattcgcccatggtgaaggcggtggccaaggtgtctggcgccaagcccgagacggtacccgcgagcatggcgctgtacgccttccccacgctgcaggagcaggtgtcggagcgctggctgggcggcggcgcggcgcgcgcgctgcagtccgcggcgcagttcctcaaggagcagggcaccatccagaccgtcctgccggactatggcccgggcgtcaatgcggaatgggcaaagcgggcgttgcgctgacgccgcgcccatcgcgctgaagatggccgccgcgctcaagccagtcccgcgcggccccgaaagtcctgttgcggaagcccatcatgtacaagcttgaaatcgataatctcagtgtcaactacggcgtcgcgggcggcgccaaaacgctggccctgtcgcaagtcaacctcaccatggagcgcggcgatttcgtcgtggcgctcggtgcctcgggctgcggcaagaccaccttgctgtcgtgcatcgcaggcttcatggaaccctcggaaggcgagatccggctgtccggcaaggtggtgcgcgggccgggtgccgaacgcggcgtggtgttccagaagcacgccctgatgccgtggctcagcgtggcggacaacgtcgcgctggggttgcgcctgcgtggggtgtcgcgtgccgaacggatgcgggtcgcgcatgagaagctggccgcggtcgggctggaagatgtcgccggcaagccggtctatcagctctcgggcggcatgcagcagcgcgtcgggattgcccgcgcgctcgcctgtgatccggcggtgatgctgatggacgagccgctgggcgcgctcgacgcgctgacgcgcgaatcgatccaggcgctgattctcaagctctgggccaaggaacagaagatcgtcttctttatcacgcacagcgtggaagaggcgctgttcctggccacgcggctgattgtcatgacgccgtcgcctggccgcatcgcgcacacctatgaactgccgttcgcgcggcgcttcatcgaatgcggggacgcccgtgcagtcaaggccgacccggagttcatccgctatcgcgaagagatcattgatctgatccatgccaccgcttgaggaacacgagatgcccgcttccgtccaacgcatcgaacccacgccgcgcgtcaccaaagccgccgcggccggggccagccagcaaatgaagaccgtctcgggctaccgcctgcccggcgaggggtcaagctcacgcatctccaccatcaccgtggtgctgctgctcgcactgtggtggctcgccagccacctgcgctggctgccgccgctgttcctgcccacgcctgagtccatcgtcaccgcctttatcgatgcctggcagggcaacctgcaaggcggccagccgctgaccgagcatttcgcggccagcatgatgcgcgtgttcggcgccttcgggctggcggtggtcacggcggtgccggtcggcgtgatgatgggggtgtcgcgcatcgcacgcggcgtgttcgatccgccgatcgagttctaccgccccttgccgccgctggcctacctgccgctgatcgtgatctggttcggcatcgacgagacctcgaaggtgctgctgatcttcctggcctgcttcgcgccgctggccatgtcggcccaggccggcgtgcgctcggtcaccatcgagcagatcaacgcggcgtactcgatgggcgccacgccgtggcaggtggtccgccatgtggtgatccccgccgcgctgcccgatatcctgaccgggatgcgcatcgccatcggcttcggctggaccaccctggttgccgctgaaatggtggccgccaccgccggccttggccagatggtgctcaatgcctccaacttcctgcgtaccgacgtggtgatcatgggcatcgtgctgatcgggctgatcgcctacgtgttcgacctgctgatgcgcaagctggcgaaggtcctggtgccctggaagggacggatgtgaggtgagggcgtagtcagcccgcgaccggcgtgtcgggcaaggacgggctgatggccagtccttgccgttttcaggcgttacgcccgtcgggcgccttttcgctccgtgaagatgagctccggctgctcggcctagtcagtgaatccagtcccagtcgatgctcagctcacagtggcaagcgggacaagccagcggctcaggcagctttcccgagaccatatcctgcaggatttcggagtggatgttcccgcacgccgtgcaggtgacgaagagtgggacaggaggtttcatcgtcgccatcgcaaggatggccagccttcaggccgccagatgctcatcccgtgcaacagtatgcggaggaagcagcgccatggcctcttccagcctctggaccagcgcgggacttgccggctgcaacggcaggcgggtttccggggagatcacgccggagagcgccagggcagctttcaccggtgccggattcggctccgcgaacatgagcgagatcaacggcgcgagcttcgcgaacaaggcgcgggccgcgcggaagcgtcctgtctgtgccagatgcagcaggcgcacgaacaagtccggacgaatatgcgaggacgcggcgatcacgccggcgcctcccgcaagcaggtgatccagcagggccgcatcctcgccgcacagcacggtgacatgcggatcgttgacaaggaccccgagattgccggcgccgcactccttgaccgccgagatctgcggctgcgcgagcagagatcggatcagcgcaggcgacatcgcacagccagttcgcttcggcacgttgtacagcatcagggggcgttcggttgcgcgcgccacttcattgaaatgccacacgatacccgcatcggagggccgcaggtagcagggcggcggcaccaggtagccggcaagatcaaagccgtccagttcggcaacttgcgcgcacaccgcgcgggtatcgatcgcgccgacgccagccatcaccggcagctcgccgtggacggcctcgagcactgccgccgtgaagacttgccgctcgtgggtggaaagcaggcttccctctccggtcgtgcccaagatgatcaggccgttcacgcctgcctcgaggtaactctcagccagcctggcggcgcccggcaggtccagcgagccggcacgcatcggcgtgaccatgggcacccagatgccccatggcgtctggcgggaagccgctgcgataccggtgcaggcatgcacggcggcgccggaaaagctctcttcctcagtgcgccacatggttgtctcccagggctgtcgtgacgccgaactccgccgccggaaaggccgtcatgatggcgtgcatggccgcgtcgcggtccgcgcgtgcgatctccacgtgcagcgtggtttcgccgtgccggtagtccacgttcaccacatagacgcgggccagttcaccgagcacccggtgcatggtctgccgcaggccgaacacctcggtggatgccaccgcaagatgcatgcggatccaggccggtgcgggctgggagaccgcgcgcagcacgggcatggtggccttgctgctgcgcagggcggtacgtcggggaacggtatcaacggccaggcttgactgtcgcatgattggatggaccggcgcggtagcgggtcgcgtgttggacatggctttatgctagccagcgccgtctaaatttgatgcaaggatgttgggccttggcgttaaatccgcatcaaaatcagcgacgctggcaaggcgctcgcgctcagaacgtcttcgtcagcgacgcccaggccgcagccttgccgaggtagcggccccggttggcactggtgtaggccacttccttggcgttggtatcgacataggcaatcgccagcgcgaagcccttgcccaggtccttggtcaggccgatcttccagtcggtgtacgaggcgtcgctgttgtgcttgacgccctggtagccgacgtgcgcgttcagtgtcaggtcccagaaattcagcgggacattggcgctcaggtcgacgtagtagctgttcttgctgtcggcccagccaaacaggttggtgaccgagtgcgagtacttgagcatgaccgggccccagccgatgccggcgtacagctcggtggtgtacgggcgcgggttgttgtagccgcccgggtagtagtactcgagcacgcccaggtcatagttgaactcggtgccggcgaccttgaaggtgttcttgaagccgccgtagaaatccatctcgaccgcggccgagaccgccgggttggcatcctcgagccagctgatgccggagttccagttgcccagatagaagccgctttcgtgggcgtagtcaaagccaccctggatggccgggcgcaggttggtctggctgatgccgcgatagcggtagtccgagaccagcgacacgttggccgtgaacgtatgcggggacggcgcggcgtctggctgggattgcgccatggccggcatggcagcgaggaagatggaagatgcggaacatgcgagcagcgtggccgcggtttggcgcaggtcagtcattgttgttgtggcgagagttgaaaaaatccccgttgcagggagcctcgccacgatatggcctgacgcgtaaaaacggtatcaaaagccgcggtgcccgcgtacaaatccaatcaatgcgcctggatttcggcgctacccggcaaaccggtagcccagcccgatttccgtcagcaagtgggcgggccgcgccgggtccgcttcgagcttgtgccgcagatgtcccatatagacgcgcaggtactggctgctttcggcctgggagggtccccacacctcccgcagcatctcccggtgcgtcatcaccttgccgcggtgggcgatcagaaccgcaagcagccgatactcgatcggcgtcaggtgcacggcctgtcccgaacgggtgacgacgcggctggccaggtcaacctgcacgtcgccgaacaggatctggtgggaaccgcgagcgttggccctggcatgccggcgcagcagcacgcgcaggcgcgcgaccagttcaccgacgccaaagggcttggtcaggtagtcatccgcgccggcatccagcgcaccgatcttgtcggcttctccgctacgtgccgacaggaccagcaccggtacgtcagtccacgtacggatctcgctgatcaatcgcaccccgtctccgtccggcaaacccaggtcgagaatgacgaggtcaggttgccgggtgcctgcctcgatcagtccgcgcttgagcgattccgcctcgtgcaccgtgcaaccttcggactccagggtcgagcggacaaagcgccggatatgcggctcatcctcaaccagcaggactgtcggggaaaaatcaaatggcatcaacttcctctcttcttgcgtgagaccctaggcatcagtctgctccggctccaccgccggcggatttccacgcggcaacgctaccaagaagcgcgcgcccgcctggccgccgggccggtccgggcgttgcgcgggttccacccagatgcgcccgccatgggcttgcacgattgcctcgcatacggcgagacccaggccgacacccgcggtcgcggattcgcgctcaccgcgcgtgaatttctcgaagatctgccgttccttgcccttgggcacgccggggccatcatcctctaccgcaatcctgatctcgtcgtcgaccggcgcggccgagagccggatctctgtgccggcaggcgtgtatttggcggcattctccagcaggttgcacagcacgcgctcgatcagcacggcgtcgcattcgaccaggggtacccgggacaagtcgacgacaaccacgcggtggtgctcgagcgcctcgcgcatggcagccaggctggcgccaacgagctcctccaccgattgccactccttgctcatccggacttcccggccctgcagcttcgccatgtccagcagattcaccaccatggtccgcatgcgcctggcctgttccagcatggcggccacggtctcggccagtgacggcgccagcccgggatcgctgcgctgcatggtttccgccatgccgatcaggctggtcagcggggtgcgcaggtcatgggagacagcggccagcaatgagctgcgcaggcgctcagactccatcgacagcaaggccagctgcgccacttcgacgtaatgcaagcgctcgatggcgatcgcgatcagcgtgcagaacacatcgacctggcgccgtagcgcaggttgcgcaaaggcgcgtgataccgcaggctcgaccgccagcacgccacgggtctgcatcggcgccttcaatggcagatacagcacggtgctgccgggcaaggtatgcgtgccggtgcctgcgggctggccgtgatcgaatacccactctgccagtacacggtcgatcgagtcggttcgcgccccggtgtcatgctgctcgacatcggacacgggcggcagcaagcggccttccgcggaaaccaggaagaaggctgaattggcatcgaaggcagcacgcaggaaacggctggcgatcgagacaatctggttcggcaccagcgccgcggagagttcacgggccagttcgtacagcgtgcgggcatcgttctcgcgctgcaccgccacctgcgcttgttcgcgcaaaccggccgtcagttgcccgatgaccagccccacggatagcagcacgaggaacgtcagcagatactgtacgtcgctgacggcgaacgacagccgcggcggtacgaagaagaagtcgaaggcggccacggccaataccgaagccagcgccgccggtccgcggccatgacgaagcgcgacgccgaccactgccgccagaaacagcatggcaatgttgacgacgtcgaaccatggaaatgcgagggccgacagtgccgtggcaccggcgcaccatgccgccgcccacaaataatctttgcgcgtggccccgtcgcctggcgctggggcgtctggcgcttcagtgccatggcgcgggcgaagatccacccgcgtcgtgtctgccgccacgcggatgatatcgatctccggacacccgagcgccagcgcatcggcaaaactgcggcggccgaacagccaggccggcgcgttcacaaatggcgtcaaggccaggccgagaagggagcgggcccgctccgcaacggaggcgccgccccggcgccagtctgccggcgcccggccgatgaccaccttggtcaggttgtggcggcgcacgtaccccacgattgcctggaccatgtcgttgcccgccagggtctcggtgcgtgcgcccaactcctctgcgagacgcatggccgtctgcaggcgagtctttgcgaaatcggacgggggtgccagcctgggggtggcgatggtcaccacatgccagtcgcaatcgagctggccggcaagccggcgcgcactccggacgacctgctcggcatcgtcaccactaccgatgcaagccagcaccgcctcccgggtccgccacacgccttgaacggcttcggactgacgccatgctcggacatcggagtccacccggtcggcggtccggcgcagcgccagctcgcgcagggcgatcagattgcctttccggaaaaagttgcgcgccgcgtgtcgcgcctgctccggcagatagaccttgccttccttcagccggcgcagcagctcgtcggccggcaggtccaccagcacgacttcgtcggcgctgtcgaacacaacgtccggcacggtctcccagacgcggatgccggtgatgccgcccaccgcctcgttcaggctgtccagatgctgcacattgaccgtggtccagacgtcgatcccggcagcctgcaattcctggatatcctgccaccgcttcggatggcgactgcccggtgcgttggaatgggccagttcgtcaaccaggaccagggccggtcgccggaccagcgccgcgtccaggtcgaactcctgcagaacccgctcgcggtacggcacgtccttcattggcaagcgctcgataccggcgatcagcgcttcggtctcggcgcggccgtgggtctccacgatgccaatgacagcatcggtgccccgtgcagacgccgtccgcgccgcggtgagcatggcgaaggtcttgccgaccccggcggaagcgccaaagtagaccctgagcttgccgcgcgaagcgcgagcgccttcttcctgcaccatctggagcagggcatcggggtcggggcgcgagccggcttcgcgcaattcggcatcaggcatcggtcggctcaccctctatgctggcattggcaaaccggttctgcttcgcatccgcgtcccggcactgggctatttccgtgcaatggcatccaagccaaggttcagcttcaggacattgactcccggaccgcccaggaccgacagtagcggcgtttcggtatttgccgcaatcaattgcttcacctgttcgatcggaatccccctggcgcgggcgatgcgcgccgcctggtactcagcggccgcagggctgatgtgcgggtcgagcccgctgccggaggcagtgaccaggtccaccggaacgggggcctggttgtccggatccgcggcgtgcagggcgacgacgcgcgcgcgcgcggcatcggtcagcgccggattggtggggcccaggttggatcccgccgaagccgcggcgttatacggcatcggcgccgtggccgacagccggccccagaagtacttcgggtcggagaacggctggccgatcagttccgagccaactgtcctgccatccttctcgatcagcgagccggctgcctgatgcgggaacacggccttggagattgccgtgatcgcgccgggatagagcaggccggtcaccagcgaaagaccaacgaacaccaccaacattggccgcagcaagccaccttgcacgggtgccggcgacggctgcggggactgcacttgcgtattcatgagcgctccgaatcgtggcagaaaatcagacccagccaaacagggccaggatcatgtcgatcagcttgatgccggcaaacggcaccaggatgccgcccaggccgtagaccagcaggttgcggcgcagcagcaccgcggcgcccagcggccggtagaccacgcccttgagcgcaagcgggatcagcacgacgatgatgagcgcgttgaagatcaccgccgacatgatggccgacgccggcgtggcgagccccatcacattgagcaggttgagctgcggataggtggtggcaaacgccgccgggatgatcgcgaagtacttggcgatgtcgttggccacgctgaaggtcgtcagcgagccgcgcgtcatcagcatctgcttgccgatctcgacgatctcgatcagcttggtcgggttgctgtcgaggtccaccatgttgccggcttccttggccgcctgcgtgccgctgttcatcgctacggctacgtcggcctgggccagtgccggcgcgtcgttggtgccgtcgccggtcatcgcgaccagccgcccgtcggcctggtactggcggatcagcttgagcttggcttccggcgtggcttcggccaggaagtcgtcaacgccggcttccgccgcaatcgaagccgccgtcagccggttgtcgccggtgatcatcacggtcttgatgcccatcttgcgcagttcgccgaagcgctcgcgaatgccggtcttgacgatgtctttcagctcgatcacgccaagcacgcgtaccgaaccgccgttggcgtcggctaccaccagcggcgtgctgccggcgcgggcaacctcatcgacggcttgcaggacagcatcggggaacttgccggcacgttccgtgacgtagcggcgcacggcatcggccgcacccttgcgcacgtgacgctcgccgccgccatcgctcaggtcaaccccgctcatgcgggtctgggcgctgaacggcacgaactccggcttcaggctcgccatcaccggcgccgccagccccggcagctggcgtgccagcgtgatgatgctgcggccttccggggtctcgtcggccagcgacgacagccacgccgcttccgcgagctgcagcggcgacacgcccggggccgggatgaagcgcgatgcctggcggttgccatgggtaatggtgccggtcttgtcgagcagcagcacgtccacgtcaccagcggcttcgaccgcacggcccgaggtggcaatcacgttggcttccatcatccggctcatgcccgccacgccaatggctgacagcagcccgccgatggtggtgggaatcaggcagaccagcagggccaccagcaccgtgatcgtcaccggaacgcctgcctttgccaccagcacgctgtagagcgagaacggctgcagcgtggccgtggccagcagcagcacaatggtcagcccgaccagcaggatcgtcagggccagttcgttcggcgtcttctgccgcttggcgccttcaaccatcgtgatcatgcggtcgatgaagctctcgcccgggttggtcgtgatgcgcgccacgatccagtcggacagcacgcgtgtaccgccggtcaccgacgagaagtcgccgcccgactcgcggatcaccggcgccgattcgccggtgatggcgctttcgtcgaccgaggccacgccgtcgatcacttcgccgtcgccggggatcatctcgccggcctgtaccagcaccacgtcgccacggcgcagcgccgtggcggggcgcgcttcggtggcactgccacgcttgccgtccttcagcacacgtgcggtgacggtggtcttcaggccgcgcagcgcttccgcctgctgcttgcttcggccttcggcaagtgcctcggcaaagttagcgaacagcaccgtgaaccacagccacaccgacaccgccaggatgaagcccgcggattccccaccgggggctgccgccggcgcggccatggccttcaggaaaaggatcgtcgtcaggatgctgcccacgtaggccacgaacatcaccgggttgcgcagctggtcgcgcggcgacaacttcccgaaggccgcgaccagcgcgggcttcaccagctccggcgcgaacatgctgcgcgccggcgggcgatgatggtgggagccgtgttggcggtcggacaccggcgcgctctttgcctgaatcgtgttggaggaagacgcttcagccgtgttggcgccgcgcttggccaccggggccatcgaatcttgttgcatggtttctccgcaatccgctagagccatccggcacctgcatcggtgaggcagggcagggtccggacgtgtaggaatgctcgatatttcgtcgtcagtcgtcgctttacttcgccgcggttgccgtcaccgcgccctggagttgctcggcgactggccccagcgccagcgccgggacataggtcagcgcaccgaccagcagcacggtgcccaccagcaggacgacgaacagcgggccgtgcgtcggcatcgtgccgccgctcacgggcacgcgcttcttggctgccagcgagcccgccagcgcaagcaccgggatgatgatccagaaccggccgaaccacatggccgccgccagcagcgtgttgtagaacggggtgttggcggacaagcccgcaaaggcgctgccattgttgttggccgccgacgagagcgcgtacaggatctcggagaagccgtgcgtgccgggattgaacacaccggcgcgtccggcctcggtcatcaccgccaccgacgtgccgagcagcaccagcaggggcgtgaccaggatcgccacggccgtcatcttcatctcgtagacttcgatcttcttgccgaggtactccggcgtgcgcccgatcatcagtccggcgatgaacaccgcgagcacggcgtagaccagcatgccgtacagccccgagccgacgccgccgaacacgacctcgcccagctgcatcagcagcatcggcaccaggccaccgatggcggtgaaggagtcatgcatggcattgaccgcgccgcacgacgccgcggtcgtgatggtggcgaacagtgccgaagcggcgatgccgaagcgcgtttccttgccttccatattgccgccggcctgcagcagcgacgcggcgtgatccaccggcaatccggccagcgccggggtcgccatctgctcggacatcgccgccacgcaggccatcgcgacaaagatgaccgtcatggaagccagcaccgccacaccctgtcgcctgtctcccaccatttcgccaaaggtgaagcacagcgccgccgggatcaggaagatcgccagcatctcgagaaggttggccaggccattcgggttctcgaacggatgcgccgagttggcattgaagaagccgccaccgttggtgcccagcatcttgatggcctcttgcgaggcaaccgggcccatcgccagcgtctgcctgtcggtcttcaggtcttccgtcaccggcttgccttgtgcatcgagcaccggttgcccggccgcatcgagcttaggctggctgtactccaccggcgtgaccaggctggcttccttgtaggcatcgaagttctgggtcactccctggctgaccagggcaagtgcaatcacggtcgcgatcggcgccagcacgtacaacgtgacccgcgtcatgtcgacccagaaattgccgatggtggcggcgctctggcgcgcgaatccgcgcatcagcgcgaacaccacggcgatgccggtcgccgcggacaggaagttctgcacggtgagcgcgagcatctgcgtcagatagcccatggtcgactcgccgccatagccttgccagttggtgttggcgacaaagctgatcgccgtgttgaaggccgagtccggcgaaaccgcgccaaagccctgcggattgagcggcagcatgccttgcaggcgctgcagcgcatagactgccaccacgccaagcaggttgaatgccagcaccgcgacggcgtactgcgtccaccccatcccggcatcggcacgcacgccgcccaggcgatacagcagccgttccagcggccggccccaggcggtcagcgaatagttgccatcctccaccgcacgccggatatagcgtccgagaaaaggggcgcacgccagcaggatggcgagatagaggaccagcaggcccacgaattgggaggacatcagaatttctccggccggaacaacgcaatgaggaggtaaacaaaaatggcaatggccagcacgccgctcaacagatcggtccagctcatcacagcctcctgtccgacgcgctgttctttgccgccatctggtcatgcgcgccgccgtggccgctgcctgccggagatttcggcgcaagcacggcgcaaagccccagcagggctgcgctcagcacggcgaagccaatcaatacgatcaaatagatcccgtccataacaaagcacccttgaatggtttcggcttgcagattagcgacggggtcgtaaaaacagggtagaaagatggccggtgcgtataaagaacgtataaagattcgggcgatcagcatgcgcgcgggagccaaggtgcaccttcttggccgctggcgatcgtgatgcgtggtggtaaggctgccgctgttggcggagatgctgcgccggcgcgacgcttctctttcggatctttacgcgacggcccggcgcgttaatcgaggggcttgacccgccggaatgcaccaaggagtgcgaggtcgtaggcgatcttgagcacgccgcaggcaaccagcggcgtcccgacccagcccatcgccagcagcgcgcccgccagggtcgggccgaatgcggcagccaggctcctgggcacggcagtcaggcttgccgccgccggccgctcgggcggcgtcaccacggccatgacataggcggtccgggtcggcacatccatctgcgacagcgcgctgcgtacgagcagcagcgccagcgtcgccggcagggagggggagaacgcggccgcgatcaggcagaggctggatgggatatgggtgaacaccatcgtgttcagcaaaccgaacctgcgagccagcggtgcggccacgagctgggagccggcgctaagcagcccggcccagaagaagaactgcccggcggcaccaatggaaaggccgaagcgctgcatcaaccatagcgccagcagggaattcaccaccaggccgccggcaaatgcgtcgacgctgaagagcagggcaaggcgggtaacgatccggcgagacggtcccagcgggactctcgccgttgccaggtgcggtggcggctccggcatgcgggcatagaggaaccagagtgcggcaccggtcagggcatagaccatgaacatggcgcgcagcgcgctgaggacaggaaccccaagttgcgccgcgagccagtccggcagcgccgccgccagcgcaccaatggccgcgcagagggccccggtcaggctgtagcgggcgaacagggcagtgcgggcatcggcgcaggctgaatcggcaagaccggcatgctcaagcggcaggaagacgctgacgtcgccggaactggggttgagcgtgccgacgaatgcgaccagcaatagcggccagagggaggacagtccggcgaagcctatgccggtggcggccatcaacgcggccgccgacatcagcagcctgcgctgcggatagcggtggccgatgatgcccaccaggaccgtcgccagcgccgagccgatcagggttgcgctgctgaccagccccactgccagctgcgcgaagcccagagccagcaggtacgccggcaacagcacggcgataaagccgtcacagaagccgcgcagcgcgcggccaacgagaagcggcaaggcgccgggatgaatgcctgcgggcaggaccaggcgcgctagccagcctctgctgacaatcatggccgggtcttcaggtgtgcgcatcgcaatggcatccgtgttccggtggtctcatgccgtcagtgaaagcccgtggcgatcccgccgtacaagaacacagtatgcgccggactcgaaggcaccggcttgggcgacacggcaaaggctggcatggcgccatgttagatggccccgcagatggtggcatcggccgcatctgcgccgcgcgccgccttggtatggcgttccaatcagtccttgagcgcgagcgcagcttccggcgcgcggaggaagctgatcgccaggcgattgaacgcattcatcaggctgatggcgggggcaggggggatcactccgagcggattcatcgatgcacttgacaaaaataccaattggtatattctggcttccatgaataaagctcagcgaacccgccagttcatcgtcgagaagacagccccgatcttcaacgtcaaaggctatgccggtacgtccctggccgatatgacggaggccaccgggctgacgaagggcagcgtctacggcaactttgccaacaaggaggaagtggccctggctgctttcgatcacaactggaagcaggcgcaggcggcagtccgggccgtaatggccacgagagaaaccagcaaggagcagctgctcgcattgacaggcgtgtatgaaagcctgcctgaggaattccccgtggggggatgcccgctgctcaacacagcgattgaagccgacgacacgcacccggccctgcgcgagaaagccatggaggctttccggggctggaagacgcatcttgtcaaagtcatcaaggcagggattgcttcgcaggagttccgcaaagacgtcgatgccgagcagactgccgtcacgctgattgcattgatcgagggcgccatcatgatctctcgcctcacaggcaacgctggctacagcaaggccgtgatgtcggcggtagaaaaaaccatcgtcgatctgaagtgattttttcgaccaaaaatataccaattggtattctatctgccaaaggaagcaaccatgagcgtgcagctgaaacggaaagtcgcattcgccctgtcgatgggagtcgtgacgacagggatcatttcctttgtcctccttactctcaatctcggattctcggaaggatttgccctgacgtggctgcgttcctggggcatcggatatgtgatcgtcattcccgccatcctcctggtcggtccgcgtttgcaaacgcaggtcgatcgcctgattcactgagccggcaggcccgcatcgaggaccactgacatgtccaggtcattcctgccgcggctgcttgcctccgttctcgtcctcggcgctttgattgcgtcgggatgcgcccaccacgccaacaagccggtacagaaagccgagatcggattcatcaaactcgactcggacatctcgctcaggacgatggtggtgcacaaccccagtccgagagggaccgttctcttcctgcatggattcccggagaccctgtacgcctggaaggacattgccctgactctcggcgatgactacgaagtacacgccatcgattggcctggctacggcctctcatcacgaccaacggccgacaagttctcctatgcgcccagagactatgcccgggttctgaaggagtacatccgcaaggcgggcatcggcacgtcaaagctcacgatctacgcaacggatatcggagccttgcctgcccttctcctggctctcgaggagccggacattgccaggacgatcatcgtgggcgacttcgccccgttcaacagacctcgttacatgtacgaaagcctgcagagcctgaagtcgcaaccttcggccgagctggctcgtgttcagttgaacaagaatcgcgaggatgttctccagaatgcctacaggcgcggcttggccagggaagcgcagttcgacatatccggcgaactcaaggacgacatgtcacgcggatggagccatggggagatgacgtcagcggacgccttctatcactactacttgcacttcacgcgggaccaggagtatttcgaggcgaacctgggccggctcaagacgcccgtgaaggtagtctggggtgagaaagacatctacatcaataaggacatgggcatcgagttcgccgagaaggcccatgcagcgttcaccctgcttcacggggttgggcactacccgcacctgcaggacccccagcaaaccgtggcagagattcgcgcttcattccggtaagcccgcattgcgagcggggcccgggcagccgacctcgtctgaggacgacgggatcccgcacgacacatgagcgcccctctgccacggacctttggcccgctggcggaccccaccgcgcacggcggcactgcgaacgacgcgtttcatctggtgattccgtcgattcccggcttcggcttttcacagaagcccgcagacactggctggaatccggatcgcatcgcacgcacctgggacgtgctgatgaagcggctcggatatgcgcgctacgtttcgcagggaggcgactggggcgccatcatctccgacgcacttggccgtctggcgcctgaaggactgcttggcatccacgtcagccgcatcgagcgcgccacgacgttgccaccagcaatagccatggcgctgaaaagcggggagcctgcgccggcaaacctgaccaccgaagaaaagcaggtgttcgatgaggcgagggatttcctcaacaagggattcggttacgcggccatcatgcaaacgcggccgcagaccatcggctttggcctggccgattcgccagtggggctggcagcgtggatctatgacaagcaggccgactgggtattcacgcgtggcgatcctgagcggtcactggaccgtgacgcgatccttgacaacatctcgctctactggctcacaaatacaggcgggtcgagcggacggatctactgggaaaccagtgccgccccggcaaggaattcccccatcaccgttccagtggcagtgaccgtcttccctggcgaggtctaccggccaccgaggcagtggttggcacgagcctatccaaacctgatctactacaaccgcgttgccaaaggcggtcacttcgcggcttgggaagaaccggagctgttcagcgcggagctacgatctgcgttccgatcgttgcgctgagcggaagacgctgtgcaggaacggtgtcggcccacggtggacgttgcgcaactcgcgtcacgctgcttgccgtttggccggcacaaccgttcctatgtacaccgccggcacatcgagcggtgtaccggacggactcagcgggtacctcgttcaccgatgccgaaatggagcgtcacgagcgttctctgctctcatgttggcagacaaggtgtcaatcaagggacaagaagcctcattgccattggcgtggcattgcccaatgagattcttcagttccgctcgcattcgtcgcagatccttcattctttcctcaacaagactgagcttttgctcggccagcgcgcgggctgtactgcacgtgctgccatcgttctgtcgcagcagtacccggatttcatccagggtgaacccgagcgactgggcctggcgaatgaaatgaagccgctgcaagctctgctgcgaatactgtcgaatggcgccataggcacgctccggcaccggcagcaggccgcaccgatggtagtagcgtaccgtctccacgccaacaccagccgccttggccagcttcccgattgttagtgtgtgctccatcgcttgactccgtaccttggtacggacctacgctacgcctaaaccgcacatacgggaagggcggattgcgtttcgatgggtaacgacagggatcggagcgccaggcacggtgaccgtctgctgcccatcggccgtgaggcaaagagaaatgatgagcgccgtcaagctgcagtcaatcatcacctgccccaagtgcgcgcatgcaaaagaagaaaccatgcccatcgatgcctgccagtggtgctatgagtgcgagtgctgccacgcgatgctaaggcccaaggccggtgattgctgcgtcttctgctcatacggcagcgaaaggtgcccgcccatgcagcagcattcctgctcgtgtgttcgccgacgcaggtacagcgatgcacgacgtaccctcgattcggttccccccggatgatcccgcctcttacccagctccgcttgccagcggaacatgtttttgctcgacattacgcgacgcccgttatacgtcgcggggaattcagagaggggtcattatgcaatcgcggatcattcgcgttctgcccgcagaagatggctgggcattggagttcggcggcctcaatataaaggcccagaaatttccgaccatggaggcggcaatcgctgcgggttggggggtggccagacgagagaacgccgaattgcacatacatcgtcacgacggggacgtgcaattgcgcaacgcgtgcggcgacgagcaacaggaggcgcggcggtgacgccgtactagctgtgaagcggcgaaaaagggcaaggagaacgcctgggaaagggtggtgagctcaagtgatgttttgggcgcacatttgccaggcagtgcctgccaaattccttgaggggagatactgtgcggcagatccgctcgaacggccacgcttgatgcggcttccacgaggactgtctggcggtgccgaagcaccgccagaccagaggcattgctatcccgcaagcggcccggccgccatcaaggcatccagctttgccttcaccatttcaagcaggcagagcgcgctgaagcacgcttccgagcgcacgctttgctgctccagcagtacgagtacgccatcaatgccggcacgcacttcatgcaggcacgcgttggtttcgattgcatcgaccattactgactccttagcaggttaaggcgcgccactcatttgaaggtgaaggtggcgggccagactgcgagggtggaaaccagtctccgggaaaaccagccagccttgcggctgcctcgcctggcccgccatggaacgatgcgttcatgcgagcacgcaggagtgccgtatgggatgcgactctcctgcccggagacacctcgggtttccacgcccggtcaccggcgatccgatgacgcaaccagtatttcctgccagagtcatgcaggcgataagagatgtcgcattcggaagaggcgcgcgaagcttgcggcaactcaggcgagtcggaaatcgttgagtcttggaatgcgaggtggtcgcggcatggaactaagccaaattatgcgttcccgatcccgccagcgaagatctttggcagggatccgtccacactatgctcccccacctgagccacaaaatcctccccctccggcaaccccaacgaaaacttcaccggaaaattcacagcaatcccgccttccgcgggtacggaccgcaccacctcccgcgcctgcacatgcggatcctcaaacagcgccgtcgcccccagcaacggcgagaacggaatatccagcggcccgaagaacgcctcccactcggccaggtcgcgcgtgcggaacaccgccgccatcaggtcattgacctccaccttgtgcccgtaccgtccggcacgcgtggcaaaacgcggatcgcgcagggccgggaactcatcacccagcgcctcgcacaggttgacccagaacttgttctcgaggatgcccatcgccagatgcaggccatcgcgcgtctcgaagagatcgttctccggcatcacggtaggggatgcctgcggcgatgcctcatgcccgcgggcggcccagacgccatgggcggtccacgacaggatcgcgtcatggatcgagacatccagatgttgcccctgcccgttctggtgcgcactcatgatcgccactgcaagcgacagcgccgcgtagccggatgcggcgtaatccgacacccgcacgcgcgggcgcgagaccttgtcgtgcacctgcaccggcgtcgcccaatagccggccagcgccaggtagttcaggtcatgcccggcgtggctggcataggggccagtctggccgaagcccgagaccgaacacagcacgatggccggattgaccgccgccagtgcttcatagcccagcccgagtcgcgccatcacgccggggcggaagccttccaccacggcatcggcattgcggaccaggtcaaggaaggcttcgcggccagcatcggtcttcaagtccagcgctaccgagcgtttgccgcgattgaactgtgcaaacaccgtcggaccaagctgccgcgcagtgtcgccggtgccgggctgctctaccttgatgacatcggcacccagttgccgcagcaggctgcatgcgtgcggaccgggcagcaactggctgacgtcgatgatggtgacgtccttgaggcaggaccattctggcttcatacagcgccctggggggagaacgaaagaaggggtgccgcacgtgcggaaggtggcgtgcggcgcggggcggaccggacgctcaccccaggtcgccgagcatgccgatcgacttcatcaggtcgccgtaacgcgcgttgtcgctggcgacaatggtgccgaactgcgcgggcgaggcgctgcggcgcagttcgccggcattggccttgagctgggcatcaaacacgccggccgtctgcagggcgccgacggcggcatgcagcttctgggtcagttcggccgggaagttggccggtgcgaacaggccgctccagttgtcgatgacaaagcccgggggcagggcttcggccatggttggcacgtccgggaagaacggcgaacgggtggccgcagtgacggcaagcaccctgacctggttattgcgcacgtattgcgttgcggtgccgagcaccggcatgccgaactgggtttgtccggtcagcatggcggtgatgatttccggcgcacccttgtaagggatatgcacggcgtcacagccggtctggtgcagcatggtttccaccgcaagatgggcgatgctgcccttgccgccggagccgtagttgaacttgcccggcgctttcttcatggcggcgatcagttcggcagcggtcttgtagggcgacgagaccggcaccaccagcgcggacggtccgccggacagggccgtgatcggcgtgaagtcgtggatcggatcgtatggcatcttgcggtacatgtgcacgttgatcacgtgcgcattggccagtatgcccagcgtatagccatcgggcgcggcccggcgcagcgcgctggcgccgatgatgccgccggcgccgggcatgttctcgaccaccagcggctggccgagcttcttgcccagctccgccgacagcgtgcgggccacgttgtcgggcgtgctgccggcgataaacggaacgatcagccggatcgggcggctggggtagctggatgaagcgctggcggcgcgggccggcagcagcaggctgcccagcgcggcggcgccggcggtggcaagccagtttcggcggttcatgcttggtctccgtggtcttgtcttatggtgttcatgccggcggcgaccgtgccgccggcacggtcaggccttctgctgctgcagcggttcaaggatagcgcgcgcaatggtgttgcgctggatctcgctggtgccggtgaagatgcggaacatgcgcagcttgcggaaggtctgctccaccggatggccgcgcgtgacgccgacgttgccgtggatctgcacggccttgtccgccacctcgaagcagcgctccgagacaaagagcttgcacgccgcagccttcatgcgcaggtcggcgccggcatcggccagcgcggcggtgtgcgtgatcatgctctcgcaggcccacagcgcggcggccatgtcggccagcatgtgctggatcgcctggaagcgcgcgatcggcccgccgaactggcggcgctggccggcatatgccaccgacgactcatatgccctggtggccagccccagcatgctggggcagtgcagcaggcggttcacgttgatgcgcgacatgcccagcttgaagccgttgccttcgccgccaaagatattggcgcgcggcacgcgcacgttctcgaagcggatgtcgccgtcgatatgctggcccgacatcggcacgtactcgttgcttaccgtcacgccgggcaggtccaggtcgaccagcaccgcggtgatggccggcggcgtggtggtggcgtcggtcacgcacatgacgatggcaaagtcggcgaacggcgcgccgctgatgtagtgcttgccgccgttgatgaccagctcgtcgccatcggccacggccgaggtcctgatgctttgcgcgtcggagccggaatgcgtttccgtcagtgcgaagcaggtcgacttctcgccgcggatcacgggctcgaagtagcgcttgagctggtccggcgtggcgtacttgagcatgttgcccacgcgcggcgggccgcccaggtcgcccagcacgtgcgcggccagggtggagccgctggcggccaggtcggccttgagcgcgcattgctcctggatgttcaggcccttgccgccgagcgatgtcggcaggcacgcggcgtagaagcccagctcgctggagcggcgccagaccttgcgcagggtctcgcgcggccacgggtcttcagagcccaggccgagttcctgttccagcgggcgcagttcttcgtcgataaagcggcggatgccggcgcgggtttccagcagtacgggattggtcaggtgatcgaacatggcgggctccttcaattcacacggcgcccgacgccttgccagtagcgttcgcgcacgatcttgcgggccagcttgccgctggcgttcttgggcagctcggcgacgaagtccaccgagcgcggcgacttgtagtcggcaatgcgctcgcggcaatgcgcgatcagctgctgcgcggtggcctcgcgcccggggcgcagcgtgaccacggccttgacgctttcgccccaggtgtcgtccggcacgctgatgacgcaggcttccagtacgtcggggtgctggtacagcgtggcttccacttcggtcggatagacgttgaagccgccggagatgatcatgtccttcttgcggtcgaccaggtacaggtagccggcctcgtccacgcgcgccatgtcgccggtgtgcagccagccatcgatgatggtctcgcgcgtcagcgcgggctcgttgaagtagccgtggaacacgtcttcgccgcggatcaccagctcgccgatctcgcccacggcgacctccttgccttgctcgtcgaccacgcgcacttcggtctcgcccagggcgcggccgcaggaggccaggcgctcagggtggttggcaatggcgtcggcatggtcggtggtggacagacgtgtgacgcccgaggtcgattcgctggcgccatagccctgcgacaggatcgggccgatgcgctcccaggcctcgcggatgcgtgccggcgccattggcgcggcaccgtaggccagagtcttcaggctggacagatcggcctgggccagcgtgggctcggccagcagcatgttgatcatggccgggaccatgaacacgtgggtgatgcgtagccgcgccacctcggccaggaagtgcgcgggctcgaatttctcgaacagcaccagcgtggcgccctggtacaggtagggctgcatcagcatgccggaggcgtgcgtgaccggcccgatcagcgccagccggtcgccggggcgggccgggcggtccatgccggacaccatcttgcgcagcgccgccatgcggttgccgtagctctgcatggcagccttgatcttgccggtggagccggacgagaagtgcagcacggccaggtcgtcgggggcgggggtgatgtcaggcggcgtggtgccggcattggccagcagcgcttcatactcgacatagcccgccggcgcatcgccgatggcaataaaggtctcgatgctgccgaagccggccgtggtgcgcgcatggccggtgtagccggggccggtgatcagcacgcgcggggtgcagttcccgaccacgtcgctggcctcggccgcggtgaagcgcgggttgagcgccgccttgaccaggccggccttgtacagcgcgcattccagttcgaccagctcgggccggttgcgcgactgcaccgcgacgcggtcgccgggctgcaggcccagtgccagcagcgcattggccaggcgcgttgagcgttggtccagctggcgataggtcaccacccggtcctggtagaggatggcgggctggtcgccccagtagcgcgcggcgcggcgcaggaaatacgcgaaacccatgctgtctccgttgatgcctgttgattccggtgagcgcttttacgtgtgctcgtgcgccgtagtctgtaagatggctggcatcaccacaatgaagtattggctataaagccataaccatcaggaatgtgaggcaatggagacgcgggatatcgaatacatcctcgccgtggcggcgcacggcggcatcggccgtgccgccgacgcgctgggaatcagccagccggcgctgaccaaggcggtgcagcgggtggagacccaggccgggctgccgctgttcgagcgcaccgccaacggcatgaccgccacctacgccggcacgcgcttcctggagcgggcgcggcgcatccagctggaatacgaggacggcatcaaggagatgctgggcatccgcaccggcgagcagggcatcctgcgcgtgggctattcgccgtcgatcccgggcaacgtgatcctgggcgcttgccggcaactggtgcgcgagcgtcccgtggcacggctgcggctgcgccgcaggctggcgcgcgacctgctggacctgctggcggcgggggaactggatgtggcggtggcaccggcgccgttggcagcctcatcgaccggcctggcggtgcagccgctctttgacgaccggctggtggtggtggcggacgagggccatgccttgctgcagcggcgcaagctgcggctggcggacctggcggaccaggaatggctgctgcccgaagggcatatcacgctgcgccagcaggtggacgcggcgttccgccagcgcggcctgccggagccgcagccgcgcatcgagatcgactttggcagcagttcgctgtttgcgctgatgcagggcacgcagatgctgagcatcgccaatgaaggcggcgatgccatgcagcacggcctgcgcgtgctgccgctgggcgtggaggagctggacctgcgccggaacatcggcgtgatctcgcgcgagggcgcctacctgtcgccgctggcgcagcgcctgacggtgctgctgagcgagcacagccgctgaggcagcggcagggccacgcggttattgcagcgggatcttggccacctccgccagccgcttccagcgctggatctcgtccttctggtactgcagcatttcggcaggcgatgacaggatcagcttggtcgactggcgcgtgtagtactcgcgcacatccggggccctgccggcctgcgcaaacaggtcctgcagccgtttcaccactgccggcggcgtctttgccgagaccgccgcggctacccagttgtaggccaggaagtccggcaggccggcttcggcgatggagggcacgtccggcagcagcggcgagcgctgcggtgcggtgtaggccagcgcgcggaccttgccgccgcggaccagttcgatggcgccggtggcatccaccacggcgaagtcgacattggccgccatcacgccgttgatggcatcgccagctcccttgtacggcacggcggtggtcttgatgcgggccaggtcgttgagccactcggagtagagcgtgtaggagatcgagcccgagccgtaattgagcgcgccggggcgcttgcgggcatcttccagcagttccgtcagcgtgcggtagggcgagcttgccggcacgatgatcacgcatggcccgcgcgacagcagcgtgatcggcgcaaagtcggtcagcgggtcatacggcagcttgcggaaggtggcggcgttggtcgacagcgtggaattgctgccgataaagacggtgtagccgtctggcggcgcgttcagcgcggtctgcacgccaatgaagccgttgccgccgggcttgttctccaccaccacgccctggccggtcagctcgccgatcttcttggcgaacatgcgcgcggtggtgtcggtgccgctgccggaagggaagggcacgacaaagcggatcgggcgggacgggaaggcgtcggcggactcggcggcgggcgccgccagcggcgtggcggtgccgatggccgccagtgcggcggcagccagtccaaggaagcggcggcgggaacggaaaacctgttgcatggtgtctcctgagcgtggaatgcccggcgtgttcccgccggtgcaaggggataagcgggggcctaacggcgcaagccgagcaggtcgcgtgcgatgacccagcggtgcacctcgctgggcccttcgtagatgcgcatcaggcgggtctcgttggccatctgctgcagcggcagctccttggtcatgcccatcgcgccgaaggtctgcatggcgtggtcgatcacgtcccacgccatctcggtggcgaataccttgatcatcgatacctgcgtgcgggcctcgtcgccggcgtcgatgcggctggcggcttcgtaggtcatcaggcggcacgcgtggatgcgcgtggcggcgtcggccacccaccactggatcgcctggcgctgcgccagcggcgcgccgaaggtctggcgctgcggcgcgtactcgcagatcatgtccagcgcccgctgcgcccggccgatgcaccacgcggccatctgcacgcggcgcgtggacagccgcgcctgcatcggcgcaaagccctggccctcggtgcccagcagctgcgaggcggggatgcggcagtcttccagcaccacctcgtaagtcgatgcgccgccgatcatcgggatgcggcgctccacccggaagcccggcgtgccgcgctcgacgataaaggccgagatgccgccgcgcgcgcccttggccttgtcggtcacggccatgacgatggtccagtcggcgcgtgccgcgcggctgatccagatcttgcgcccattgagcacccagtgctcgccgtcgcgttcggcgcgcgtggtcatcatggcggggtcgccgccggcgccgggttcggaaatggcgatggccgacacggtctcgccgcgcgcgtaaggggccaggtagcgctcacgctgggcctcgctggcgctcagcatcagcatgcgcaggttgggcgagtccggcggcaattcgtagggcgtgatggtcttgcccagttcttcgttgacacccaccatggccaccgtgggcaggtcggcgccgcccatctccgtgggcgcatccaggccccacaggcccagttcgcgcgacatcgcgtcgagccgcgcatgctcttccggcagcagcgtcatctgcccgccggcggcttcgcgcgccagcaccgcgggttccagcgggatcagctgctcgcgcacaaagcgcgcgaccaggtccttgagcatccggtgttcgtcgtccagttcaaagttcatgccctgtctcctgctgattcgttatggttggctgacgccttgggcgaggcccagctcctgcaggacttcggcggtgtgttcgcccagtcccggcgcatggcggcgcagcgacagcggcgtggccgagaagcgcgcggcggggcgcacttcgcgcagcgggccttcggtggggtgctgcgtttcctggaacaggccgacggcgcgcaggtgcgggtggtcgaccagcgcgtccaggccgtagatcggcgtggcggggatgtcgagcgactcgaacagcgccatccattcatcggtggtgcgcgccggcgtcaactcggccaggtgaccgtacagcgcgcggatattggcgttgcgctgcgcgcggtcggccacctcgtagcgctcggccaggtcgtcgcggcccacggcgcggaagaaggcttgccagtggcgctcggtgtagggcagggcgcagatccagccgtcgcgggtcggcgcgggtcggcgcccgccctgcagcaggcgggcgtagccggcgcctgtgggtgcgggctcgaaggtcaggccgcccaggtgctcggccatcacgaacgcggtcatggtctccagcatcggcacctccaccgactggccgacgccgtggcgctcgcggcacagcagggctgccagcacggcgttggccagggccagcccggtagtcttgtcggcgatcaggctgggcacgtactccgggcgatcgccggtggtggaacccagcgcgaccagcccgcagccggcctggatgatgtcgtcgaaggccggcttgtcgcggtgcggaccgtcctggccgaagccggtggccacgcagtagacgatgcgcggattgatgcgcgccacttcggcatagccgaagcccagccgctcgatcgcggctacgcgcatgttgtgcaccagcacgtcggcgctggcgatcagcccgcgcagcgcctcggcgccctcgggggtcttcaggtcgagcacgaccgagcgcttgttgcggttcagcgccaggtagatcgagctcatgccggcgtgctgcgagacgccgttggcgcgcatcaggtcgccctcgggcccttcgatcttgatcacgtcggcgccaaagtcggccagcacctgcgtggccagcggcccgagcacgaccgcggtgaggtcgagcacgcggatgccgtccagcgggccggccggcgtggcgcgggtgtcttgttcgctcatcggggccactccttcaacggcgcttgaaaacaggggcgcggcgcgcggccatggcggcgacgccctcgcggaagtcttcgctgcggaactgtccgtgctggattgccagttcgcgctggttgatctcggcgatgcggtcggccagcccttcgcgcagcgtggcgcgcgtggattccacggccagcggggcagaggcggcgatctcttgcgccagggccatggcgcgggcattgacctgcgccttttccaccagttcatcggccaggccgatctcgaccgcgtcggtgccggtgatgcgccggccggtatagaacagcagcgcggcctgctgctcgcccaccagccgcggcagcgtcaggctcatgccgaaaccggggtgaaagcccagccggttgaagttggcgctgaagcgtgcctcggcgcaggtcacgcggaagtccgccaccagcgccagccccatgccggcgccgatggcggcgccttccaccgcggccacgatcggcttgcggttgcggtaaagcctcatcgcatgcgcgtagaagccgcccgggtcgttggctatcgcgccctggtcggcgccgctgaagtcggccccggcgcagaaggcgctgacgccggacgccagcacgatggcgcggcagttctcgttgtcgtccagcgcctgcagggtgtcggccaggcgccgcatgatgtcggcatcgacaaaattgtgcggtgggcgggacaggacgatgcgggcgacgtggccttcatgggtgacctggatattggcgtcggctgacatgcggggcgttcctctgtggtggatcggctcgggggccgggatggacacagtattcgcgccgcacggccgtaccgctatactctaatttcactaactgaaattattggcgatgccggacgccgtgctgccagagccctccacccgccgcgtcacgcaccagaccggccgctttacccgcgacaccgcgggcagccagtcgctggagcgcgggctggtgctgctgcgggccttccgtgttggcaccaccagcctgaccaatgccgagctggcggtgcgcaccagcctgccgcgccccaccgtcagccggctgacgcgctcgctggtggatgccggcttcctgcgctatgacgtgaacgaacgcgcctaccggctggcgccggtggtgctgagcctggccgatgccttccaccagtccagccgcgcgccggacattgccttgccgctgatgcgcaaggtggccgaggccggcaaggtcaacgtggggctggccgtgggcgaccagctggagatggtgtacctggcgtcgatccggcacagccgcgacagcgtgtcgcgcacgcggcgcgtggtgccgggaacccgcgtgccgatggagatgacggcgatcgggctgtcatggctggcggcgcagcctgagggggtgagggaggacctgctggccggcatcgccgcgcgccagggcgaggactggatcaacatgcgggccaaggtgctgcgcggcatcgcgcaggcgcagcggcacggctattgcaccgcggcctaccagcccgggcacctgctggccgtgggggccgcattttccgggccggaccagcagctttacgggctcaatatcagcttcccgttcaacgagagcgagcgcagccgcgacaatgcccgctatgcggcccagctggagcggctggtggcggacatccaggaggcctggcgccgcgccgccggataatccgggctcagtacaccgacggcatgcctgcgggccggttcttgaagcgccggtggatccagtaatactgctccggcatggtggcgatctgggcttcgaggaaggcgttcatgcggcgcgaatcttcctcgacgctgcccgaggggaagccttccagcgggtcgaatatgcgcagccggtagccgcggtagtcgggcagcacttcggtggtgaagggcaccacgcgcgcgccggtcatgctggccaggcgcgaggccgaggtcagcgtgcaggccggcacgccaaagaacggcacgaacaccgaatcgttgatgccgaaatccatgtccgacgccagcattaccgggcagccggcgcgcagcgtgcgcaccacctgcttgccgctgccgctgcgcgggatcatctcggcgccaaagcgcccgcgctgcgtgcgcgagatgtcttccagcatctggctggacatcctggtgtacagcgaggccaccgggtggcgcatcgaatagaacatgcagccggcctcgatgccgacgaaatggaagcccatgaagatggtcggatgctccgcgcacgaggccaggtcgatgcgcgagtccagttccaccagcttgcccaggcgctcggcgctgccgaaccactgcacgccgcgctccaggtagctgcgcaggacgtggccgaagtggttccgtgccagcttgtcgcgcgtgtctgcatccatgtccgggaagcacagggacaggttggtatggacaatgcgccggcggcggctggggatgcgatacagcagcttgccgatcgcatcgcccaggcgtgcggtgacaccgtacggcagggcggcgacgagcttgaagactgcgatggtgagcgcagcctggagccggtgtttcatgtagatcctaggagcggcagcggcggctcgggcaaaggccccgggcaggcggctgcgcggcaataattcggcgccactggctggtggcgaacggggtgcacccgaacgacgggaagagcgagggccggcccccggcatatgcccggcgcctggcgcggcacggtgtgcgcgtcggaggctgacaaagcaaggcgggacgccagggcggcgcccccggcacggcgcgcgggccgaagggcggcgtgggtgcgctatgcgtcgctgcgcaagctttctctgaagggcgcactgtagcacgatggcagctgcccggcgatgacggttactaccagtagcaaacagggggagattattgcagcgcctgggtgattcagcggaaatgctcgggccggggcagggcatttccgactgtgccggggtgcgatccggggaagggaaaatggcgctgaataatacgcgcaggcggcgtcgtcacgcctgcaataatgaccggcgggattatcgggcaggaattgctcagggttttttcaattcgcccaggtagtaattgacctcggccagcagggcgcggtggaattccgccggcaggacatggtcgtcggtcagcgacatcaactggttgatgcgctggcggaagcgctgctcggcgctggcgcgcgccgccggcggcaggcctgtggtcagcgagcacagcagctcgcgcatcaccagcaggcgcgcgccatactggatcatggcatcgccttgtgtcttgaggttttgcgccagctgttccggcatcgtcttgcccggctcgccaggtgcacccggagcgggagattcggcggtgttgtggtcattgttgtcgggcgcggccgcgccggtcttttttccaagcatggtgatcctgaacatgggcgaggctccctggtacaagcggggccggcctgaaacgccggcggcctggatggcagtagcactcatcatggaagcctgccgtgcaccggactgtgcggcggcagacactgggacgccttgcgcggcgtcagccggccaacgccgccggcgcgggtttgcggcccttgcctgcgcgcgcaggcggcaagcacagtccgcagacgtagcggtggcgcgcatcgtcggcctgcacgacatactcgccccggcagtccctgcagcgcgccagccgcagcatgccgcgctcatagaagcgcaccagcgtccaggcgcgggtaaagctgagctgcgaggcctcgccggtggcgcacagctgttcgcggtacatgcggtagctggacaagaccgcgcggatcccgtccaggctgccgcggctggtcatgaagcggtaggcgccaagcagcatcgaggcatgggcattcgggcgccaggagacaaaccagtccgtggagaacggcagcatgcccttgggcggcgacaccccgcacagctccttgtacagccggatcaggcgcacgcgtggcagagacacttcggactccagcacctgcaggcgggcgcccaggccgatcatctcgattgccaggcggatctgctcaacatcctgcagcatgctcttgccgggacgcgggggcctggcgcgcggaaccggggccggtgagccggccacagccgtgccggcgatatcgtgtacatccattgttctcctccgatatatcgggaatgggcgcgggcaagccggttgctgatccggcttgcccgggcctgtcaccgataatcatgacccggcgtgtcaccgtgcgcggcacggctcctcgcgggtccggggctcaggtttctcgtagtcgaggaggatttttggatcgatcggggcgttataaccatgacatgcatcaacaatcatatttccgcgattattgtgtgtcaggtacggcgcctggatttaaccgtccccaccccggtgtaggagaagtgcccgcacgctatcggactgacgccgatttcattggcaggccaatggactacgctgcaagaacaccaacgacggagcgacccatggctgcgaacttcctgatcaggcagacggcgcaaggctgggaactggcggtcgaaagtgcccgcaagggcctggtgcactgcgaggatcgcgaaatcgccgtcagtatcggcatggctgcggccaggcggcgtggcgtcgcgctgatcgtgcaggaggaagggggcggcaatgacaccccgagcggcatcacaccactggctgcctgagaacaggcccgccccgcccgatagcgcggtacggcacctggcgtgccatcagaacaccccaagccccaatcccgctgccaacccctcacccaactccgcgcaacgcgccaagtccccggcttcgatctgcttgggcgcaaggatgcgctccggtgtctgcgcatgcgtacagacgatcagccccggcgccacggcgttgagccgccagccggtggcgatgcgctcgatctggcgcagcgcattctggccatcgctgccggcgcagatcatggtggcgtaggggcggccgttgatgcggtccagcgcggcgtaatagcagcgatcgaagaagtccttcatcatccctgccatggcggccaggttctccggcgtggcgaagagatagccgtcggcgccaaggacatcgtccgggcctgcctcggcagcggtcttgagtacgaccgtgatgccgggctgctggcgggccgcgccagcggcggcctcggccatctgccgggtgcctccggtcatggtgtgatagacgatcagcagcgttttcatgcttgcgtgggggcggtgtgccgtacgctgaagactgtatcacgcaggccggcgacgacagttatcgtagaatccggggcagccatcctgcgcgcccggcgcacgtgccaccccgtcatgccgaaagccaaagcccccgctcttgaccgctccgccagcgagcaggccatccagttgctggatgccgccaccgatcatgttctcgccaatggcctgggcgatctgtccttgcgcagcgtggcggatgcgctcggcacgagccaccgcatgctgatctactacttcggctccggggatggcttctggcaggcactgttgcatcgcatccgccatgcggagcaggccgcccgcgagcgcgtgatggtggaaggcatggctcccgaagccgcgatggaagcggcgtgggagcgctattccgccccaggctacctgccgatcatgcagctgatgttcgagatctacggcaaggccatccgcgaccgcgagcgcttcagcggctttctggaagacgtggtcggcagctggacaaccacgttggcgacgcgcctgcagcgcgacctcggcctcggcgctgccgaggccgggctgcgcgcgcgcgtggaacttgccaccatgcgcggactgctgctggacctggtcaccacgggtgaccgcaagggcacgacggccgcgctgaagtacttcgccgccaggatggcggcgcttccccaaaccggcaagtaacggttttttccccggaaatccgcgtaaaccccgatttttcccattcgtgtaccacgtggtacattgcatcccacgccttgcgaacgaggcgaatcgtggcaaaccaacagggtgcaatatggatcggcgacaactactggcctgggtggccgggactgcggtggcgatggcgctgccagggatcgggcaggcgcaaaccttcccttcgaagcccgtacggctggtggtgccgcaggccggcggcaccggcaatgatgtgctggcgcgcgcgctcgcggaaaagctcagccgtgcctggaaccagccggtggtggtggagaacaagcccggggccaacgggacgctggcgatcagctatgtgatcgggcagcccgccgatggctacacgctgttcttcgccggcgtttccaacctgagcttcaatcccttcctgtatccgaagctgccctataacccgggtcgggacctgactggcgtggcgatgctcgccaactcgccctttgtctttgtcgcggcgccgtcgctcaaggctatacgttccaggatttcgtgcggatggccaaggctcgccccggcgagatcagcttcgcgtcgggcggcatcggcaactccacccacctggcgatggaactggtcgcgcaacgcaccggagtccggctgcagcacgtgccgttcaatggcagcggcggctcgaccagcctgatgaacgggcagaccccggtgatgatgaacgtgctcgcgggcgtgcagccttacatcgccggcaagaagctgataccgctggcggtcaccggcgacaagcggcagccggctttgcccgcggtgcccaccttcaaggagcttggctatgacgtgcaggtacccgggtggtacgcgatcgtggcccgctcaggcacgcctgcaggcgttatccgcaaggtcaatgccgacatcaaccagatcctggacgacccgcagttccaggggaagcttgccttccagttcctggatgcaatcaaggggccgccgtccgaggtggagcgctatatgaagcgcgacgccgatacctggggcccgatcatccgcaaccttgccatttctctctgaggaccgctgccatggcacatctcaccaaggccgtacaaggctatcgcctggcggcgatgcacaggctgatggacaagctgcgcgtcgatgcgctggtgttcggcacgcctgactttttccagtacgcgaccaatttccagctcgatgtctggccgtgggagcgcccggtgttcgtggtggtgccgcgcaatggcgacaccttcgcggtcatgaacgagctgtcgaccaaccatatgcgctttgcgaccgggaagggctcggtctggcttgccgatgtcacctactacgccgagcatccccgtgtctcgaatcgcctgccgctgcctgcgcagctgccggaagtggttgccgcgctgctgggggccagggggctcggcatgtcgcggattgcggtcgacgtccagcatccgatcctggccggtgcgcagcgctgcctgcctgaactcacgctgcggcccgccatggcggagatgcgcagcctgcgctgggtcaagcatgcggaggagctgcaggtcatgcgcgagctaggtgcgctgacagactgggtgcaggatcgctaccgcgagaacttccggccaggccggctggtgcaggagcttgaccacgccatggcggcgctgatgtcggaggaggcggcgcggcgctttccgggcgaggacttcgacatcctcaaatgctggacgctgaccgggccagcttcggcatcgccgcatggcgatggcgccggatgcggcgcacggatttccgccggcgacaccatcgtcaacctggtgctgccgcgcctgaacgggctgtatgtcgagaatgagcgcacctggttttgcggccggcccggcgacgagcaggcgcggttctaccaggttgcggcaaaggccaccgacgctgccgttgccgcggcggtggtcggcaagcgcgtctgcgacatggatgcggccgcgcaggctgtgatcgagcaggccggctgcggggactatgtctttcatcgcaccggccacgcggtcggtctgatgctgcatgaatacccggaggacatggccttcaatacccgcccgctgcttgcgggagaggtgtattcggcggagccgggcctctatgtctacggccttggcggcttccggctggacgataccgtggtggttggcgaccagccggaggtcatcatcaagacgccgaagacgctggaatacgcaaccgtggactaggcgcccgcagcgtagctcagtcgagtgtcacccccgtatccgccgtcagcttgagcaccaccggcaggtacgccttgtacgccgcctctgcctgtgccggggtattgccgagcggttccgcgcccatgtccacgatgcgccgctgcatgtcggcgctggcgaccaggctggcggtctcgcggcccaggcggtcgatgatgtcctgcggcgtcttcgcgggcgccatcagcgtgatcgggccggtcagccggaacggttcgtcggcgtagccggcctcggcgaaggtcggcacgtctggcaggccctgtgcgcggcgcgtgccggtgacagcgaggggccgcagcttgccggtggcgaagtgttgcttgagcgcggtcacggagcccaccgtcacgttgacctggccggcgagcaggtcggtcaccatgggcccttcgccgcggtagggcacatgcagcatgtcagcctggtactgcctggcgatgtaggtctggatcgtatgcggctgcgtgcccgcgccccacgaccccatgcgcagcttgcccggcgatgccttggcataggccagcagttcggcaacggtcttggccggcacgctgctgttgaccgccagcacggtgcgcgcggtggcgatgtcggagatcgggcgcagctcagtgcgcggatcgtagggcagcttcttgtacagcgccaggttggacgtgatcgggccgggaatggtcatcagcagcgtatagccgtcaggcgccgacttggcgacgtagtcggtgccgatgatgccgccggcaccgcccttgttctccaccaccaccgtcttgccgagctggcgcgacaggccatcgccgatggtgcgcgccagcgtgtcggtcagcccgcccggcgggtaggcgacgatcaggtggatgggcttggccgggtaggcgccctgtgcgccggccggggcgggcgcggcggccagggccagcacggtgagcaggggcagggcggcttgcagcagcgggccgcgcagcaggtgggcagcggtcgtcatgatggcgttgtctccttgggatggatggtccgtgttgccctacgtcgaaggggaagtctcactccagcttgatgccgcgcgccttgatcagcttgccccatttgccgatctcctggtcgatgaaggcggaaaacgcgctgcccggctctggctgcggctcgagccccagccccagcagcttcttgcggatctcggcatcggccagcacggccgatgcctcgcggttcaggcgctcggagacggcgggcggcgtgccggccggcgcgaccaggccgaaccagccgtagccgaccatgcccgggtaaccctgctcggcaaaggtgggcgcatccggatagaccggcgaacgctgttccgaggccactgccagcacgcgcagcttgccggccttgataaagggcagcgccgaggtgatggcggtcagggtggcgtccgcgcggccggccagcagttcggtataggcggtggcgtcgccgcggtaatggacattcagcagctggaacttgccgacctgcccgaatagctcggcggtcaggtgcgggccggagcctgcgcccggggaggccagcgtcacgccatccggcttgtcccgggccatgcgcacgaagtcggacacggtgcgggccggcgagctggcattgacgatcaggaagaccgggcccagcacgcgcggtcccaccggcacgaagtccttgtggacgtcgtagcgctgggcgatgcctgccgcggtattgatggcgaagggcgcggcagcccacagcagcgtgtagccgtccggcgcggcacgggccacctgctcggtggccaggcgcgtgccggcgccaggcttgttctccaccaccacctgttggcccagcttgtggccaagtgcctcggcaaggatgcgggcagagatgtcattggagccgccggcgccatatggcgacaccagcttgaccggccgcgacggatacgtttgcgcctgcgccgggctggccaggcacagcatcgccaggccggccgtcagcacggcccgggcgaagattgtggtccgattcatgatgcttccttcatgcggcggatgggtggatagcggaaggtgcgttccaggtgcgtggtgccgggcacgtagaggcgcaacgctacatagaacggctccgcgggtgccggcagccagttgccggccagggcgttctccgaagggggttgcgcgcccagcacgatgcgcaggctgccatcgggcgccgggcgcagggccggcgagcggtcgcccagcgagtagcgctgcagcgggttctcgaccagcatgcagtccgatttacggtacatggtcagcgaccagaatgcgcccacttggggtagtccttgccggggaaacaccagttcatactggcgcctgccgtccagcggcaagccgtcgccatcgcaatcggccatcaggtacatggcttcctcaacgcccagcgcaccgatgtagttgcgcgccacttcggcgcgcagagcgtagtgggtgccgaacgaggtgcggatttccaccggcaggaaccagccgccgcccagcgcggagaccctgggcgcggccagttccgcgtcaacctgcgtcagcgcggtggccagcgccgcgcgctgtgccccggtcagcggcgcgttgctgccgatgccggccggggcaaagctgcggaccagttccgcttcggccgcgggtggcgggttctcgcgcagcatgcgggtgacgacggcggcgtagcggtcgggatcggccggccgctcgccggcttgcatgccagcatcgaatacggttgctgcgctggtgccgtccggccggcgcaggcggatgccgtcctgcagggcatgtgcacccggcaaatcggcttcgccatcggccaggatgcggccgatgatccagaccgcgttggtggggcagggcagcggcgttgcgccggccggcacctcgccccgccaggctggcccatgcagcagccaggtgccgccttgcgtgccggtggtgcgggtgccgatatagccgaacgggttggtataggcgtcgagcaggcctagcacgtagtagcggccgcggcagtcgggcacgtcgagcagcagcgggccgccggacaggtcgagccacgcattggtgtagagcgtgtcgttgttcggcgtgacgacctgccggtgctgcgggccgagcagcgtgcgcacgtgcgtgaccgtgttgatccagcgcagcgttgtgtcgggcccgtcgccggcaaagaccccggcgccatcgcgccgcgggcaggtggcggcacgcatgcgcgccatctcgtacagcggcagcgtgtagcgcaccgcgtcgcacgccagcgtgccgagcaggttgtcgtggtgttccatggcgcgctccatcaggcaatgcgccgcaagggcgggatcacgtagccgccggccatgaagccatcggtcgggtggtagagccgcaggatcaggtagaacgggccgtccggtgccggcagccagttgtcctgcgcctgcgtggggcgctggtgcgagatggtcagcgtgaggccaccgtcgacatcgtattgcagaccaggactgcggtcgcccagcgcatagcgcccgatggcgttgtcggtgaagaagcggtcggcgccgtagagcgagaccgaccagaacgcctgcgccggcggcaggtgtcccgcggggaagtgcagggcgtaggcgtggcggccgtgcagcagttcgccgtcggcgtcgtagtcggcagcggcatagacggcctcgtcggcgcgcagtgcgcccaagcccttcatcgcggtgaccgcgcgctgcatccagtcgtcgccatagcggcccagcagcaggctgtaggtccagctcttgcgcgcatggctgcgggtgttggcttcgatcagggccatgccttcgtgccaggcgcggaccaggccctgttgcaccgcaggccgcagcgcgcccacatcgacggcgtcgccggcgcggatgccgcatttgcgcagcagcgacagcaggccggcggcggaaggctcggcgggatactcgcgcagggcgttgaagatgttggcgaagaagtccagcgcgggctcgccgccctcctgccagtcgcgcacgcaggcgggctgcatcctggcgccgccggacaggtagaagccgttctcgaaggcgctcgccgccggcagatcgtcggcacccgtcaccagcacgcggcccagcagccagaccagtgcggtggggcagcgcaccacgtggtcgccttcggcctgctgcccggggccggccagcacgatgtcggcgccggccgcgggaacgttgcgcgggcccaggttctcgaagttgttggtccaggcgtccagcagctccaccacgtaatagcggctggcgtccggcagcgccggcacgtgcagcgtgaccgggccgtcggccaggttgacccaggcgcagaagtagagcaggtcattggccggggtgacgatgtcgcggtccttgtgtgtccactggtgggtgctggccgacagcacgttgacgggggcacggccgtagccggtggcctgggctacggaggtctgcagccggcaggtgcgcaggctttcaaacagcggataggtggcaagcaccagcggcagcgccgccgcggcggtgagggcttcctggggcgtgtcgatgggcgcgccggcaaggaagggcgcagcgggttggttcatggcgttgtctccgtcgggttttgctttactcgttgatgccgtccccggcatgcagcgtgaccacggcatcggccgcgaccacgccctgggcggtgacgatcagcggattgatctccagcgtgtccagccgcggcccgagtgcggcggcggcctgcgacacgcgcgccagcacttcggccacggcatcggcatcgaccgcgggatggccgcgatggccgcacagcagcgcttcggcacggcttgcacgcagcatggtgcaggcgcgggcatgggtcagcggggccaggccgaacgcggtctgccggaagatctcaactgccgtgccgccgatgccggccagcgctaccagcccgaagaccgggtcacgccgcacgcccaccatcagctcgccccagccgcgcaccatgccggcgaccagcgcgccctcgaagcgcgccgggctgccgtggttggtagcggcggcctgcacctgcgcaaacgccgcacgcaccgcctgcgcatcggccacgttcagcaccacgccgcctacgtcgctcttgtgcaggatgtcgggcgaacacagcttgacggcaaccgggtagccgatgccttcggcgatgcgcacggcctcgtcggcatcgcgcgccagtccgtggggtgcggtggggatgccgcaggcgttgagccactgcatggcttcgaactcggacagcgacgtagtgtcgcgcggaaggtccggcgcagccagggccgcggcagctacggcgggcttcgcatgtgctgccgctgcctgcgcggcggcgcgggccagcacggccacggcctgcaccgcttgggcgggttcgcggaagaccagcgcgccgcgcgcttcgagccagcggcgcttttcgtcatcgaccagcccgctgaacagcagcggcgccgcggtgccgctgcggtgcagggtctcgacagcatcctgcaggccaggccagatgcgcggcgcaccaacgccgcccgccaggaaggcgacgacactgccgtagtcggggctttgcgccgcggcggcaatcgcgtccagcagcacttccggctgcgccacgatctgcccggtgacatcgatgggattggccgtgctggcaaaggggatggcgctgcgcagcgcagtggccgcggcttccggcatgggcggcaggggcaggtccagcgcctcggcctggtcggccatcatgatgccgacgccgcccgaaaccgtgaccaatgcgaccggcgtgacggcgctttccggctctttcgccgagggctgccagcgcgtcggccgacgcccgcgcgagagcacgtagcccagccggaagaagtcatccagcgtatgggcgcggaatacgccgtactcgtcgaagaccgcctggtagacggcgtcctcgccggccaggctggccgtgtgcgattgcgcggagcgggccccggcctcggtggtgccgaccttggtcaccaccactggcttgcccgcggcacgcgccgccgccagcgcgcggcgcaggcgggtgccgtcgcggcagccttccaggtaggccaggatcacgcgggtggcgtcgtcgtgcgccagccattcgatcacgtcggccacgtgcaggccggcttcgttgccggtggtgacccagtgactcagccccagcgatgcctcgcgcgccagcccaaaggcataggcgccgaaggcgccgctctggctgaccagcccgacttcgcccagcggcggcagcccgctcagcggcatcggcgagaaagtggcaaagacgcgctcgcgcaggttcatcgcacccaggcagttgggccccagcagcgtgatgccgtgcgcttgcgcgagtgccgccagttccgcctgcatggcgatgccgtcgccgccggtttcagcaaagcccgaagtgaagaacaccgcggcgcgcgtgccgttgcgcgccagctggcgcatggtgtccaggctggcactgaccggcagcgccacgatggcgaggtcggccggtgtgtccagcgcatccagcgagggcaccgcagccagcccctgtacttcgcgcgccgtggcatgcacgggaatgatgcggccggcgtagcccagttcgctcagcagccgcaccggcatgccgcccaccttgtcgggctgggtggaggcgccgatcacggcgatggtgcgcggctgcaacagggcgcagaggtctggcatcgcttgtctccgtatgcgtgcgccatgacttccaagacggcgccgcgaatcttgtcattggtgtgtccgagcatgttgtcatgacatgttatgatgagtcaatgttgttatgataagtagaagcccgcatcggacatgccgtgaacaccgccaatctcgtgacaacaagctccctgcctcgcttcaagcagatcgaaggcgcgctgcgccagcgcatcgtcaacaacgaatggactccgggcatcaagctgccgtctgagtctgagctgatggctgaattcggcgtcagccgcatcaccgtgcgccagtcgctggcatcgctgcttgccgaagggctgatcgagacggtgcacggcaagggcagctttgtcagccgtccggcggggcaggcggacctggggccgttgactggctttttcgactacatgcgcgcgcgcgggcacgaagcgcacggcaagctgctgtcgacgcggctgatcgcggcgccggccatcgccaccgatgcgctgcgcctgccgccgggaaccaggctgctgtgcgtgaccatgctcaagtcagtggccggcgtgccggtggcggtcggcatgacgatggcgcccgaaccgctgatgcgcgcgattctggagcacgacctggaaaaccacgatgccctgatgatcgtggaggcccgcctgggttatcgcctcaagtacctgcacacggagagcgcagcaatccctgccaatgccgaaaccgcgcgccggctcaaggtggcgccgggcgagccgctgctgcgcatccggttcacgccgcacgacatcgacgagaagccgctggccttctccgaattcatgtttcgtggcgacaagttcacctacaaagcctgcgtgcggcgctagcgtcgcctggcagtggcgccgggggaacttttgtgccggtgccgtggcctgaacggcatcggcgctggcgttagaatgtggcgcccagttctgccccagcccaggagtccaagatgctctcgccgcttttcccgcgttccctgcccaccgcgctggtgatggcgttgtcggtcacgtgcgcgtcggcggcgctggccgcggggcaggatgaagcgccaaagccgcgcggcaaggacgaggccccggaggccccggtcgcctgcatgaaggcggtcaaggcagcgctgcccaatcccgccagcttcaagtgggtcagcggcaaggcccgcaaggtggccgaagacgcctacagcgtggtggccgacgtcgaatacctggcgcaggacggcgccgtgcgcaaggccaaggtccagtgcgacgtgctgcgcgccccgggcaaccagttcgtggtgcccaaggtcaggctgccgcagcactaggtcccggcaggccagcgcggcacagcaaatcccaggtaaaagtggacgctgtccatttcatttgctaggctatgtgtacggcatccacaaacatctgtgggtgcaatccaaggagaccgcgaatgaagaccgaagcgcagaaggagcaccgctggctgcaacggctggtgggcaactggatcgccgaaggcgaggcatcgatggggccggaccagccggtgcagaagtgggagattcccgagcgcgtgagcagcgtcggcgacgtctgggtccagtgcgtgacgcagggcgacatgcccggctgcggcccgtccaccacggtcatgacgctgggctacgatcccgcccgcaagcatttcgtcgggaccttcatcggctcgatgatgacgcacctgtggatctatgaaggcgacctcgatgccggcggccagcaactgacgctgcgtgccgaggggccggattgctccggcaatggccgcatggcgcagtaccgcgacgtgatcaccttcaccgacgacgaccaccgcacgctgacgtcctacatgctgggcgagaacggcgagtggacccagttcatgaacgccagctatcgccgccagcgttaagcctggcggcgctgggccgcgagccgtgccagccggccgcgcgggccgggcggatcgtcgtgcgggtgcgcggcgctgcccccggcatggcgccggcgccggcggcggagcaccagcagcagcgacgccggcaccagcagcaccagcgccagcaaggcgaacgtgaacaggcccggatcgcgcgccgcggcggcgacccggttcaccaggcaggcagcgaccacgatgccgggcagcatgcccagcgcggtgccgaccaggcagtcgcgcaggccgatgcgcgatgcgccgatcaccaggttgaccagcgcgaacggtgcaatcggcaccagccgcagcaccaccatcgccaccagtccgtgcttgcccaactgctggctgacccggttcagccgtctgccgccaaagcggcgcacagtattgcgccccagcaagcggccggccaggtagcctgcgccggtgctcagcacggtgccgcacagcgccagcgcggcgccgtagagcgggccgaaaatgaccacggtcagcaggatcagcagcgtcaccggcagcattgtcaccgcgccggccaggtagacgcccatcatcgccagcggtgccagcggcatctcgtccagctgctcgaccaagccgagcagcgcgcggaagtccgcccattcgcgcagcggcgtatggcgccatgcaaatgccagccccgccagcatcagcgccagcaccaccatcatcccgacgcgcccgagcacgcgcgggcgtgcctcatggctgacgaactcggccagcacctggtcgctgtcgatcggctcgatcgggtccagcaggttggccgccggcgaagcggcatcgacatcgtccggcaacggcggctcgtaggcttccagcgagcgcccgtccgcgcgctgcaggttgcggatggccgcaagcacgctgcgggtggcggcgacctcggcctggaaggtttcaggtgccacatccaggtgctcgcccagcagccgtgcgcgcatggcggcaatggccgcctgcacgcgcgggtcgccgcccgacatcaccaccacattgcactcggtatccagccccagcgagcggttgctgaggttggacgagccgatggtgatgaggtcgtcgtcgatcaccgtgaccttgctatgcacattgacacattcgggcatcaggccgggaatcgacgggcagtacaaacagaagcgttcgtgcgtgtcggccgcgcgcaggcggcggtacaggcgagcgcgcagcacgcccatgctgtgcgcttccagccagccgctctcgttgcgtctcgacaccagcacgatatcggggccgtcctcgtgccccagccgtgcctccagcgcgttggcgatctcgcgcgagctgaagtactggttctccatgtagatgctgtgccgggccgaggcgatggcatcgtgcagcagcatgcggatctcgctgacactgggctcgtcctcgcacatgggcatggtgcgggcgatggcgacgcgcacatcggtcagctccggcgccaggcctggcggccacgggtctgacgaggtggccgcaaccgggcgcggctcgctgccgctggcgcgcagccagcgcgccgcgcatagggtgcccagcgccgcggcggcggggccgtcgagcgcgcactgcacgtcatggaagggcgggtagggcttgccttcggccatgcgcaacggcgcgccgggggcatggcggttgtcgtcccagcggcgcagcgtcaggtccagcccgccgacaaaggcgagcttgttgtcgatcactactaccttctggtggtgcgaggcgcccgggggatggttgccgtcaagccggaacgccaggtgccggtgcgcctgccagtgcgcgctggccgacggcagccactcgcgctccatcgccatcaccatggcgtagtcccagctcaggatatagatgcgcagctcagggcgctggtccgccagcgcgcacaggaagtcgcgcaggcccgccggcaggccgtcctgtgcgccctgcggcaccagttccatgcggctgtcgatatcccagcccaggatgaagatggtgtgctcggcgcgcggcagcgcttcgcgcaacgcgcggaagtaggcgtcggcgtcgaccagcatggcaaagcgctggcagggctcgacgcgccagcagttgcgccccggctccggcgtaaaggcggccggggcctggtgatcatgcggagggccagtggcgggagacgcggtggtgccgggcgggttgtgttgcctcatgtcgcacgcttcggggaggttcagccagaaacgtcgcgcaagttccgtaccggtgcgccaagcgggctggtccaggcgtgcaggcaatgccccgggggataagggccagccgtgggcggctcaggcgcgtgtgcgctttacctgccctttgtaagaacggcatgccggcgcgggcgggtcggaagacccggcatgcggcgaagacgctacgacggatggccgcgccgcagcgccgtggggcgcgcaatgccccagacatccagtagcggctcgaaatgcggtttgctttcgcgcggtgccggcgccacgcggcgcggcggcggcaaaggccggccggtcagcactagcggggtatcggcctctgccggcgattcaggctcgccggcgtaggccactacgcccatctggcgggcggacttcagcgcgcgcgtcagttccgcggcgttcaggcggctggcggcggcaagctggtgccggggcatgggccccttggcacgcaggctggaaatcaacgccatcacgcattcccgggtggttcgattcatttcgctgcgtcaggaaaaagggtacagcggtgggctcgccaatcgagcctgccgcgtacggtacccattctttcgcaggggtcatatccttgccaaccggatatgacacttgttcacatttcctagcgcagagagaggaatcgtccctaggctaatgccgcgtttccgggtcgccggtcggaaatctgcgatccgcgcggtcgcgcggggtcagcatcgtgccatgccggcgccacttgcgcgcgtgcctggcatggatgtcttcggcaagttcgtgcagttcggcaaccctggcgtcgatcgggtcgggatagatgtccagcgggcgatacctgaggaacaggcgcatgggggtctcggttggtcctggataatggcgtgctgccttgattccagtatcggtgacagacccgtagctttcacgagcgcagacgtaacacattgatttcactcaatgtgtttcccgcaatggattgttgtggcccgcgttcgccgcgggcccgggggatgcagggggaaccggcggttgacggtggccggggtggtcagtagccgacgcgggcggtgccgcgtgcgtcccggcaatagatcttgcgttcgcgcaccaggccatcgcggccgtggatgcacaacggcaggccatccgcgcgcgcgcgcatccagccggccgcgatcgcggcttcctgggtcgggaaatgcagcgcggtgtcgtcgccaccgttccccaggccttcgatggtgagtgcccatccgccgtcgccggcgtattcggcgttgtcggttgcggcgggaagcacgtggatgctgcgtgacgtcatggtgttctccggagggcgtgggctgacatttgatttttaagcgacggcgccgccgcgggtatccgtcgatgtcctacaagcgcgcacgcggtgacggccggtcgcgccgtcggctgacatcccggtaggacgaaagccgactttttgcgctgcggtgcgttgctacgatccaattgccggtcgggcaagcggctgcccggtcccaagccattccgatccactccatcctggcggcgcatgtcgcatccacacgaagcaaggagatcgtcatgagaaagctatttgcactgtttgccctcgctggcgtgatgctggtcacgggttgcaataccatggccggcgcaggcaaggatatcgagcgcggcggcgagaaggtacaaggcgcggcggaaagcaccaagcagaagatgtaagtcccgctgcctgccgccctggcattgctacggcccgcgtctggtgacgcgggccgttgtctttgtcacggcgaattcaatgtgcggccgccgccggcgcctgcgccgcatcgatgtggttgcggcgccagctggcgggcggcaggccgaactcgcgcttgaacgcgcggctgaacgcggcctcggaatcgtagccgaccgcgcccgcgacctcgctgatggaacggttgccgctgcgcagttcggcggccgcggagcgcagccgccagtgcgccaggtactgcatcggtggctgccccagcaggtcggtaaagcgctgcgccagcgccgagcgcgacaggcccacgttgcccgccagctcatcgaccgtccacgggtaggcgggccgcgcgtgcatgcgcgacagcgcccgccccacatagcggtcgcgcagggcggcaagccagccgctttcattgtcaggcagggtgtcgatgcagcgccgcactgcctgcacgaacagcagctcagacagcttggccagcaccgtggcggtgcccgcacgcggttccgccgcttcagacgtggcaaaggccagcgccgacgccagccatgccgattccagcccgctgcccagccccaccttgaacagccgcggcagcgacgtcagcaaggggttgcccatggtgtcgtcgaaccccaggaagccgcacaccatgcgcgtggtctcgccgccgccgccgtaggaaacgcgcatgacctcgcccggactgttgcgcagcatgtcgtacaccagcggagcggacggcagcggctgcagacgcaggtcgctgcccagcacgtgcggctcgccctgcggcaccaccagcagttcgccggtgtcgacccgcaggcccgggccggtgccgtcgaccaggcgcgcccagcagacgccttcggtaatcaggtggtaggagacgacgcggtcggcgcggggcaggaaggcggcgcgcaattcagcatccgcttcactgatcaggcaccacggcgacttgaactcgccgttcaggaacacggcaccgctgagctgcacggcgcgcaagaggtcggacaaggcatccatggtcacattcctccagatccggtgtttcgcgcaagaaagccggacgcccgatcatacgggcaaggggaccgggctccgatactagcaccgtgcctggcgccatacaacgccgcagcgcacgtatcagactagccggagacaacaccatggaaaccctttccgcagcggatgccagcgcaggcgcacaggccgactggctcggcctggccgcgaccctgggccgcaccttcgacgcacgcgcgccagagatcgatgccagcgggcagttcgtcagcgccaactacgacgacctgcgcgcgcaccgcttctttgccgcggccgtgccgcgggaacttggcggcgccgggctgtcgcaccaggagctgggcgcggtgctgcgcgagctgggcaagtactgcggatcgaccgcgctggcctttgccatgcacacccacccggtggccacggccgcgtggcgctggcgcaatcagcaagcgtcggtggaggggctgctcaagcgcgtggcgggcgagcagatggtgctgctgggcagcggcggttcggactggctgcagggcagcggcaaggctacgcgcgtggatggcggctttcgcgtggatgcgcgcaagatcttcgccagcggcgcgccggcggcggacctgttcatgacctgcgccgtccatgacgatccggagaccgggcccacggtgctgcatttcgcgctgccgatgaagtcgccgggcgtacgcgtgctgtcgaactggcacacgctgggcatgcgcggcaccggctcgcatgatgtgctgcttgaaggcgtgctggttccggataccgccattgccgcccgccgcccgcaaggcgtgtggcatccgatgatgcatacggtggcgatgatcgcgctgccgctgatctatgcggtctacgtcggcgtggccgaggccgcgcgcgatatcgcgctgcagctggcgcgccagcggcgcctgagcgcacatgcggtggaagccgccgggcgcctgtgcaacgaggccgatgccgcgcagctggcgctggatgcgatgttcgcggcggcatcggggcaggcgccgggcgcggtcaccaccaaccgcatcatgtgcgcccgcacgctggccgcgcgcgcggtgctggcgacggtcgaggcggcgatggacctggccggcggcgcgggcttctatcgcgatgccgggctggagcggcgctttcgcgatgcgcagggcgcgcgcttccatccgctgcaggccggtgcccagcaggagtacgcagggcgcatggcactggggctggatctcgatgcgccgcccggcgaggtgcggcctgccgcgcaatgatccccgccctggcgccgctgccgtatgacacgcaagcctgcaacgacagcggccaggacgacccggcccgcgccatcagccacgatggcgcggcgcggcgggccttgcgcgatgcgctggggcagtttgccacgggcgttaccatcgtcacggccgcggacgccgacggccagccggtcggcgtcacgatcaatgcctttacctcggtgtcgctcgcaccgccgttgctgttgtggtgcctggcacgcagctccggcagcctggcggcgctgcgtgcggcgccgtgccacgcgatcaatgtgctggggagcgggcagcaggccttgtgccggcgcttcgccgcgcgcggtgctgaccgcttcgcgggcgtcgattgccgccccgggccgtttggcacggtgctgagcggcggcacgctggcgtactttatctgccggcaccactcggtgcgcgtggtgggcgaccacgtgatctttgtcgtggaggtggtggcctatggatcgacgccgggcgcgccgctggtgttccacgcaggcgggtttgaggtaccagcgccttagccgcgcttgcccgcgatcaccagcgcaatgccgcccagcaccgcggccgcgctcaatgccagccgcaggctcagggcttcaccgagcagcgcgatgccgcctgccgccgtaatgaccggcacgctcagttgcacggtggcggcgatggcggccttcagctgcggcaccacggcataccagatgacatagcccagcccggaggtgatggcgccggacaacagcgcataggccagccccgcgccgtccagtgatcgctgcgcctgcatcaccgcacccagcgccagcgccatcggcaccgcgcgcaggaagttgcccgcggtggtggaagcgggatccgcggcgcgcctgccgcgcagcgaataaacgccccatgcgatgccggccgcgatcatcagcagcgaggacggcagcggcggcgtggccagccctggcagcaacagccataccagcccggccagcgccagggccaggccaatccattgctgcaggcgcatgggctcgccggcatagaggccatagccggtcatggtggcctgcaccgccgcgaacagcagcagcgcgccggtccccgcggtgaggcgcacataggcaaaggaaaaggccgcggcatagcagaacagtgcaagcgcggaaatccagttgccttccaccggcggcagccgttgcgccacgaccgtgcgcaccaactggtgccgcgccacgacgatgacccacagcaccagcgccgccgcggcgacgcgggccagcgtaaagctggccgcgtcgatggtggtgcccttcagcgcgagccggcacagcagtgaattgccggcaaaggcgagcatcgccagtgcggtcagcaccacggtgttcgcgcgcggcatgcggcggggtgggcggtgggcgctgcgtggttcaggctgcgggcggttcgtcgccgatggcgaacgaggacaggtgctcgatcgccctgaccagtccggaatgatcccagcccgcgccgcccagcccgctgcagacattgaacagctgctggcacgacgccgtgttgggcaggcccacgccgagctggcgcgcggtggacagcgccagttccaggtccttctggtgcagcgcgatgcggaagcccgggtcgaaggtgcgcttgatcatgcgttcgccatgcacttccaggatgcgcgagctggcaaagccgcccatcagcgcctcgcgcacgcgcgcgggatcggcgccggcgcgggcggccagcaccagcgcttcgctgaccgcctcgatggtcagcgccacgatcacctggttggccaccttggccacctggccgtcgccggcctcgcccacgcgcgtgatgttcttgcccatcagctgcaggatcggcagcacgcggtcgaatacttcctgcttgccgccggccatgatcgacagcgtgcccgccttggccccgacctcgccgccggagaccggcgcatcgatatagtcgacgccgagcgcttcgatgcagcgcgcgaactcgcgcgtggcgatcggcgagatcgagctcatgtcgatcacggtaatgccgcctgccgtgtcggcaaggccgtcagcgacccccttctcgccaaacagcacccgctccacgtcgggcgtgtcaggcagcatcaggatgatggtttccgactgcttcgccacctcctcggcgctggcgcaggctttcacgccggcatcctggaggtcctgcggcacgccgctgcgcgtatgggcgaacacggtatgcccgccgtcgacaaggtgctgcaccatgggcttgcccatcacgccaagtccgataaagccgatcttgctcatgtcagtgtccggtagtggtcaggcgccaggccggccgtgcgtcgcgcacgacgccgggttcatctctgatgatagtcagtcgcacgccagcgcagacagcggccccggcgcaggctgcgcgccggcgcgcgcggccgccacccgcgccgcggcgtcgtccaactgcgccagcgtgccggcgtcgaccggcatatgagtggcgcgggcggcgcgccaggcccgttcgggctcgcccggcaggcggatgccatcctgccccggctgcagccgcgaggccttcatccagtcggcgaacgccgccacctcatgcccgaatgacgtgctgttgcccaggcgcgcgggatcgaacacgatcgccagcatgttgttccagaccgcgtgctcatgccgcagcgtttcggggcggatggtgtggccgccggtgaccgcggcacccagcaactcgcacatcacggccagcacatggcccttgtgttcgccaaagggccgcagcgcgccttgcggcgcgccgtcggcggggtacatcacggcaggatcggcgctgggctcgccatgcgcgtccagcaggcagccgggcgccaccggcacgcccttgttgtgggccacacgcaccttgcccagcgcaatcgcgctggtggcgaagtccagcaccagcggcggctcgcccgccaccggcacgccgatggtgaacgggttggtgccgtagcgcgcatcgtagccgccgtgcggtgccacgatgggcttggacagcacgttgacgaaatggatcgagatcatgccggcggcggtggcctgctcggcccagtggcccacgcgccccaggtggtgcgactgccgcaggcccatcacgcagacgccatgctcgcgcgcgcggccgatggccatgttcatggcctgcgccgtcaccgcctggcccatgccgcggttgccgtccaggctcagcatgctgccggcatcgtgcagcacgctgacctgctggttcagctgcagctcgtcggcctgccaggccagcacatagcgcgggatcatgccgacgccgtgcgagtcatgcccgctcaggttggcgccgaccaggtggtcggccgtcaggcgcgcctcttgcgcgctgctgcccgcggcaagccagagatcggccacccactggtgcagggcggcggtagggatgcggtgttcgctcatatcggccttggctagggatgaaaaaagccccgtgccgtgtgacggcaacggggcttcatgatacggccggcgcgagcttggtggcgccggcatggccggtgatcggctactgcttactggcgcagcgcagcttcggcaggtgactggccaaggatttcgcggatacgggccaggtaggtatcgcccaccgcgcggtgcatgcgcgccgcctcggccgcgaactggcgccggctgggcgggcggatgcccaggctgcggcagatcgttgacagataaggcttgcgctggccgcccaggcgcagcgccgcggtctgcagcgcggcatcgccgatgcgaccgcgcagccaggcaagcacctggcggtcatagtcgttttgcacacggatcaggtgttccatggacgggactcctactgttcatccatacaggtactgtaaatatatacagtatccagagggatgcaaggagtttgtccaggaatacttcgggcgaaaggccaagttggctacaagccacccagggcgttcacggtgaacgccagaatccccatgttgaaaaggaacgcggccacgcagtggcccaggaccaccctgcgcatgtgtgcgccggcgatggtcacgtcagaagtctggaaagtcatgcccagcgtgaagctgaaatagaggaagtcccaatagctggggtgctgcacgcccggcacctgcagcccgccctggtcgccggtggcggtctggaggtagtagagatgcgcatagtgcagcgtgaaaacggtgttggcaaaaagccaggaaaggataagcgtggcgacgatcagcgcgatgtcggcccagtgcggtgtctcggggcgcgcgatcagcgtgccgattgcgaccaggatcaccatcgagagcagcacggtgatcgtgagcagcgctgtgcggttggcatcgttgtgttccgccgtgcgccgcatggccgcagcatcggcgcgcaacagcggcagcgcggcgccaaggaagacaagggccgcgagatcgaagccgatcagcagggcgatgcgtggctctgcgccgagcgcacccgcggcaaaggtcgcaacgatcaatatggcgccgcacagcagaaagcgtgcgggtgcgatgcgcttgccgatagcgaagcgggcgggtctgttcatggggtattcatccggatgacccttcgtcaggaaaggaggctggccatgcgtgaataatatccgtgccgtcgcgcagtttgttacgctgcatgcgcctttcatttggcggcctcgaggtcgataatggccctgtgccatgaccggcaaggagagacgcaatgaccaaaagctcttcctccacggataagcccgatctcacccagggcgtgccgctggctgaccttgctgacggcggcatggtcacaggccaggttggcggcaaaccggtcttgcttgtgcgtcgggctgatgaactgtttgccatcggtgcgacctgtacccactatggcgggccactggcggacggcctgctggtcggcgatacgatccgatgtccgtggcatcacgcctgcttcagtcttcgcaccggcgaggtcctcgggccgcccgcccaggacgatctgaaatgctggcgcgtggaacagcaagacgggaaggccttcgtccgcgacgcgctgccggcggtgcggccaccgaggcttgcctcggcccggctccctgaatccgtggtgatcatcggcggcggcgccgccgggactgccgcggtcgaaaccctgcggcgcgaaggctatagcggccccgtcacgctgctgagtgccgatcgctcattgccgtacgatcggccgaatctgtcgaaagactacctcgccgggacagcaaacgcggactggctgccaatgcggccaccgacgttctacgcggatcacgacatcgacgtgcgctccgacaaccgtgtcgtcaagctcagccccgagcaaaaatccgtcacgctctcggacggcagcaacgtgagctacggcgcgcttctgcttgccgtcggtgccgtgccgatacggctggacgttcctggcgcaaccttgccgcacgtgagcgtgctccgcacgctggccgactgcgacgccctgatcgcgcgtctcggcacggcacgccgatgcgtcgtggtgggcgcaagctttatcgggatggaagtcgcggcagcgctgcgaacgcgaggactggaagtgcatgttgtcgcgcccgaagcgcatccgatggagcgggtcctgggcgcgacgctcggcgacatgatcaaggcgcttcacgaatcgcacggggtaacgttccatctcggggccacggtggcagagattcagccggatcgggtgagattgtcgaccggcgcggagctggccgccgacctggtcgtgaccgggatcggcgttcgccccgacgtggccttggcgcaggacgccggcctcgcactggacaagggcgtggcggtcgatgaattcctccagaccagcgaacctgacatctatgccgcgggcgatattgcgcgctggcccgacccgggaacgggccagcgtatccgcgtcgaacactgggtggtcgccgagcgccagggcgtggtggcagcgcgaaatatcctgggacagcggcaacgctttgcggccgtgccattcttctggacccagcactatgatgtggccatcaactacgtaggccacgcggagcaatgggatcgtttcgatgtcgacggcgatcccgccgcgcatgactgtacggtgacctattggggcaaggataaaaggcttgcggtcgccacggtcgggcgcgacctggcgagccttcgcgcggaggtggcgttcgagcaggagacgacaggacactaggcaggggcgagtgcgcggtccgcaagcccttcaagcaggtcggccgacgggacaaagaacaggctgccggtgaccgccttgctgaagtcaagcagccggtcgtaattgccgggcggcaatccgacgaacatgttctcgagcatcttctcgatcggcgcgggcgaacgggcgtagccgatgaagtaggtgccgaactcgcccgcgccagggcggccgaacggcatgttgtcacgcaggatcttcacttcctgcccgttctcgaccagcgtagtcagcgaactgtgcgatgacgatggcttgacctcttcgtccagttcgatgtcggacagtttcttgcgcccgatgatcagttcctgtgtctccacgggaagggcgttccacgcggtcatattgtgcagatacttctgcacgatgacgtagctgccaccggcaaactcggcatcctcgtcgccgatcaccgtgaaatcgaccgcctcgcgtccggccggattctccgtgccatcgacaaagccgatcatcgcccgcatgtcgaagttgcggaagccgtgcacctcgtcgacaacctggatcgcatcgccgagcttgccgagcagttgcgtggcaagctcaaagcagaggtccatcgattcggcacggatgtgcaacagcaggtcacccggcgtggcgatggcgacgcgatcgccggtgccgaactcccggaacgggtgcagcgccgcgggacggggcttgccgaacagcctgtcccacgcgtcggcgccgaagccgcagacacaggacaggttgcctgacggcacacgatggccgaccgcgcgcacgacggcggcaacgtcggcacaccaagcgcggacggtgccggcgtggtcgtcgccgtcggtgagcgtcgcaacgatgaatatggcgctgcgggtgactgtgccggaaacggcctgtggttcggggatctttgtaggcatcggactcttcatgttggttataccgattcggtttgcgggctgacggaagagaattcaacgcataagcctacacgaattgagtggcgcctctgacctttcattttctcctgaccaggcagtgtcagttgcagttgtcaatccaggcagctggagcaaggcctgtgcctgtgacggcatccttgggtagtcaggcggttcgggcgcgcggcaagcgctgcgcggcatccgcgacggacaaaatgtccatgctgagccaggtctcgcgggtcattttgtccattccgttgtcacataaggcatcgcttataggcacgcaaagaatcgctgaatttaccttaagtggccaggcaattatcttgtctccaacgatgcaggaacactaagcaaagcggcatcgaagcacgcttcagcaagcctcatcggccattcaaacaaggataggggagaccatgcatgatcacgacgaggataccccggagaccatccctgatggtctccgtcacgtcagtctgccgggctacctgacgcagccatgatcgtcggcacggcaggacatatcgatcatggcaagacctgcctggtcagggcgctgtcgggcatggataccgaccgcctggaggaaaggaaggcgcgcggcttctcgatcgagcttggctatgcgtacgtgccgctcgagaacggcgacgtgctcggcctggtcgatgtcccgggccatcaaaagctgattcacaccatggccgcgggcgcatgcggcatcgacttcgcgctgctcgtggtcgccgccgatgacggcgtgatgccgcaaacgcgcgagcacctggccattgtgcaactgctcggcatccggcgcggcgcgatcgcgttgaccaaggtagatcgcgtgaatgacgtgcggctacggcaggtgcgtgaggagatcgcgtctttccggcgcggcagcatgctggaagacgccccggtttttgaaacctgtgcaatgcgcgccgacgacccgggtgtgaacgcgttgaagcggcacctgcatgcggcggcggccgcgtcgcgaacgaagcgcgacgacgggctgttccgccttgcggttgaccgggtcttcacgcttgccgggcaggggacgatcgtgacgggaaccgtggtgtccgggcgcatccatgtcggcgacagggtgttgctcgcgccgaagaacgagtctgtgcgcgtgagcggcatccatgcgcagaatcgtcctgctgctgccgggcgggcggggcagcgctgcgcgctgaacctggccggcatcgacaagggcgcgatcgagcgcggtgactgggtggtcgatgtgcgcctggcgcaggcgtcggagcgcatcgatgtgatgctgaccctgttgccggacgcccctgcgctggagcactgggcgcccatgcatgttcacctgggcacgcagcaccaggtggcgcatgtcgcgctgctcgatggcccgacgcttgcgcccggccagcgcgcgcgcgtgcagcttgtgttcgagcggccggtatgcgcgctgcctggcgatccctttgtcgtgaggaacgcgcaggccagccgcaccatcggcggcggcgatgtactggatccgttcgcgcccgcgcgcaagcgccgttccccggcgcggctggcttggctcgacgcgatgcaggccatgcttgacaccggatcggtcggggcattgctcgagcaggcgccacacgggctgtcgcgcgcattgctggaacgcctgagcggcatgccggcggcggccatcgagctgccgtgtgacacgcgcgtgatcgaacttccgggcaacgatgccttgctggtgtccggcgcggcgtggcgggcgctgacggggcgattgaccactgcgctccggcaattccaccaacgctcgccggatgtgcttggcccggaggtggcgcgcttgcgcaggatcgctgcaccgctggcgcaagacgcgttgtggtgcgcgctcgtcgatgacgcctgcgcgcgcggcgagatcgtccggaccggcccctggctgcacctgcctgagcacaccgtgacgctcgacgacgcggatcgcacgctcgccgcgacgctgcagcaggacatgaaagcggggcgcttcgatccgccatgggtgcgcgagctggcgagcgcgcatggcgtgccggaggacaaggtgcggcaactgatgcgcaagctcgcgcgtcatggcgagacgtttcaggtcgtgcatgacctgttctatgatccggaggctattcgcgagctggccttgctcgccgctgtcgacgccagcaagaacgccggtacggtcgtcgccggggcatttcgcaatgccaccggactcggacgaaagcgtgcggttcaggtcctggagttttttgaccgtgttggctatacgcgcttcgaccgtggccgccatctggtgcgcacggacagtcgttggctggagttgctctgacagggaaaaccgcctgccgccattgagattcctgggaattctcaagcgttgcggggctctccactcctccctcctccccacactacatccttatccacaaattcgaggccgtattgcggtgacagcaatacgacgattcgcactttcgtaacgaacctccaccacgcgatcccggaatcggcatcctgtgcgccagcggacgcgatgcgcgtgcgtccgcggcttcgatggaataggagataaatatcataattaaattggatataaagatcatgctcatttgaaatttgaaatacatcgattagtcatcattttcccatttttaatgcactgcacgaaaactgtgcgtgaatttaaaaagaattcagcgaatatcgtccgaatacggcatttggtgctggcatgctacttgcgctaggtatgtccaggcgccaacggcggcgcaacattaactagtagttacgaccaacggtggtcgtgattccgggacaaaggcgtccgagtcaggcgagcggtgctcgctgggccggatgcattttttttgtctgtaagtggtgcacagggggagtcaggggtgtcagtgatgctgcaatcgataccaaacacaaaggctgtccaagcgccggtcgtcgtgatcggcaccgggccggtgggcgtgcggcttgcgcaggacttgcatcgtcgcgatccttccattccgctggtgatctacggcaacgaaccatgggagccatacaaccgcgtgcgcctgtcttcctttcttgccggcgatgcgagctgggccacgctcacgcaggggcttgcactgccgcagggacccgcgatcgcagcgcggctcaattgcgcagtggtgcatgtcgatcgcggcgcgcaggagattgaagactcggccgggcgcacgcaacgctattcccacttagtgctggccaccggatcacgtccgcggatcccggacgtgccgggcatcggccaggccaatgtctacgttttccgtgacatgaacgatacccagcggctgctcgcacgccgtatccgcagccgccgtacggtggtgttgggcggggggctgctgggcctggaagcggcgcgcgcaatgcagcgcttcaacaccgaggtgctggtcatcgagaacaacgaccggctgatgatgcagcaattggaccaggccgccgcggatctgctgcgcgcccatgtcgaggcggccggaatccaggtattgacgggcgccgcagtgaaacgcgtgcatggtgaaggagcggttaccggcatcaccctgcgcaccggcgatgtcatcgaatgcgataccgtcgtgattgccgccggcatcaagccgaacaccgacctggccctgcaggccggcctgaatgtggggcgcggcattcgcgtcagcgaccgcatgcagacgtccgatccacatatctacgccgttggcgaatgcgcggaacatcgcgaacaagtgtacgggatcgtcgcccctggcctggaacaggcggcagtcgccgtgcatgcaatatgcggcggcgacgccagctatgccggttcgctacaggcaacgcgcctgaaagtgctcgatatgccggtgttcagcgtgggccgcgtcggcgagcatgacggtatcggctcggcgagcacggcggcttatgaagacaaaaaaactggcatctaccggaaggtgctggtcgagcgcggtcatctgattggcgcgatggcggtcggcgaaggcgcagacctgcgtcggctgcaggacgcggtcagcggcaatcaccggatactgccatggcagctttggcggtttcgcaggaccggctcgctgtggcaggagggcgaagccagcgtcgtcaactggccggcaagcgcggtcgtctgcaactgcaccggcgttacccgcggtcagcttggcgaagcggcggctgccgggtgccgttcgatcgagcaactcgcagcgtgcacgcgtgcctctacggtatgcggttcgtgcaagccgttgctggccgagttggccggtggcgcggtgatgcgagaaccggtgcgcgcgcatcgtccgctccagggcgcggccgcggcggcactggcgctcgccttgctggcactcgttgcgcctgccatcccctttgcgaagacggtgcagctgcagtggcgctgggacgagctatggctggtgagtttgtataagcaggtcagcggattttccattctcgggttgagcgtacttgccctgcttctctcattccggaagcgctggtcgcgccttggctatggcgattttgccatctggcgcgtgctgcatgtggtgctcggattgggtgtgctggcgggactctatgcgcatacgggaggcaggcttggcagccagctgaatttcctgttgatggcgagtttcaccggcctgattctggcgggcagcatgtcggggctgatgatcgcgcaagggcatcgcctgccagtggcactggttcggcgctggcgcgacaacagcacctgggtgcacatcttgctgttctggccggtacccgtgctgctcgggttccacattctcaaaacttactatttctagagcctaccagcgatggcaagcaaaagccgcagagttctgtgggtctactggggtgtgttgagcgtggcgatgctggcatatttctcgattgggctgttctacaaggaggcggcgaggcatccgctcctggtatccgcgcgcatggcattcctgccgggtcagaccagccacggccactaccagatcgaactggcgtgcgagagctgccacagcaagccgttcgccggcccggaggccatccaggaggcatgcgccaaatgccatgagaatgagctgaaggaagccagagattcgcatccggccagcaagttcgacgatccgcgcaatgccgagcggctgggaaagatcgatgcgcaggcatgcgtcacctgccatgccgagcacaagccgcgcacgacgcttgccatgggcgtaacgcagccgcaggacgtctgctaccactgtcatgccggtccggacgagatgccgtcggaccacaaggacttcaagttcgacagctgcaccgcggccggctgccataactatcacgacaatcgcgcgctgtacgaagatttcctgctaaagcatgcgcagggcggcaagctgaacgaaaagccgctgctgccgcagcgcgattttgccgtagcggtgcgtgagatgagcggctacccggcggcgaagtatccgttccggacactctcggcagccgagcaggatgcgccgcacggcaagcgcggcagtacggcgttgcaggccgactggctcggcaccgcgcatgccagggctggcgtcaattgcaccggttgccatgcatcgaagggcaaggacggttccacgaaatggagtgaccacccaggcagcccagcagcgtgcgaaggatgccatgcggccgaggccaaggggttcctggcgggaaagcacggcatgcgactggcgcaaggcctgacgccgatgacgcccggcgacgcccgtctgccaatgaaggaagcggctgcccacacggaacttggttgtacttcctgccattctgcccatcgcttcgatgccaggacagcggcggtggagtcatgcatgagttgccatgacgacaaacacaccctggcctacaagcgttcgccgcactacgcgctgtggcaaaaggagaccgccggacaggcgccgccgggttctggcgtgacatgcgccagctgccacatgccgcgggtgcggatgtccaccgacgaaggctcgcgcatcgtggttcagcacaaccagaacgataccctgcggccgaacgaaaagatgatacggaccacgtgcataagctgccacgggctcggcttctcgatcgacgcgctggccgacaagacgttgatcgacaacaacttcaaaggcatgccggcccggcacgtgaagagtatcgacatggctgtggccaaggatgcggaaacgcgcagcaagcgaagcacgccttagctgcgcgtcgttctggcgcttgcgggcttcttttcaacagtgaaggagagagaaatgaaacgatatgcgaacttgcaggcaagcagtctggcaatgggcgcggcgctggccgttagcgcctttcccgcgcacgcatccggcatcagtccaaaggaaatggcggatgccctgcacgccgtgatggcggccgaccggaccgtgtatacccgcctgatcgtcaaccgcctgcagaacgaagagaaggtgatcaaggcgactgagcactggaaggatgagaagacattggtgctgccggcgcagatgtttcgcttcggcgcggaggaggtagccaagagcaagccgaatttcagttattcgctgttgtccctgtggccgctgaataagcagaacgctgcgaaaaccccagtggagaaggaagggctggacttcgtcgccaagaaccccggaaagaacttctacaaggaagagactctcggcaagaagacctatttcaccgccgtgtacgccgacacggcgatcgcgccggcctgcgtcacttgccacaacggccataaggacagcccgcgcaccaatttcaagattggcgacgtgatgggtggcgtggtgctgcgcatccctgtcagcaattgagccagcgaaaagctgagcgatgacgacgtgaaggcagtagcggattacatgatcgcaattgtcaagtaaaggaatattccatgacaccgcaagagatcaccctggtacaaagctcctggcagaaggtggtgccgatcaaggaaaaggccgccgagctgttctacggcaagctgttcgaaatggatccctcgctgaggccactgttcaagggcgacaccgtcgaacaggggcgcaagctgatggcgatgatcaatgccgtcgtcacgaaactggaccagctcgacgacatcgttcccgctgtacaggaactcggccggcgccacgtcgcctatggcgtcaaggacgaggactacgacaccgtggccggcgccctgctgtggacactgggtgccggcctcggggacgcctttaccgatgaggtgaagggcgcctggaccagcgcctacgtgatcctggccggggccatgaaagacgccgccgcgaccgcctgggactgactcaggaggaatgaggccatgctggaagcagtgtcactgaccgccgcgcgcggcgaccggccgattttcatcaggctggggctgcgcgtggagcccgggcaagcggtgcatgtcacaggcgccaacggcagcggcaagactaccctgctgcgaatcctggctggcctgctgcgcccggaatcgggcgagatccgatggaacgggtgtgcggtggcggcgagccggccgctgcccgattccgcatacctcggtcaccgcaacggcctgaaagcggagctgagcgcgctggagaacctgcgcagtgcctgcgcgctgtacggttgccgcacggatcgtgcgcacctgcagcgggtgctggcacaagtcgggctggccgctggtgccgacaccgctctcgggctgttgtcgcaggggcagcagcgccgggttgcgctggcgcgtgtgctgtccagtggcgcgaagctatggctgctcgacgagccgaccaccgcactcgaccagtccagcatccgggcctttgagggattgtgcgaacaccatctgcagtcgggcggcatgctggtgtttgcgaaccactacccgctgcggctggtggccgcgcggatgcgcgagcttgccatcccggcgatcgccgatcgatcgcagcaggaggcggcatgctggatccggtcctgaaactgatcgcgcgtgagctgctgctggcgtggcgtcgcccgtcggcggtgctgacaccgctcgccttttttgtcgcggtggtcagcctgtttccgctggcggttggcccggagcggatgtttctcgccaggctggcgcccggtgtgatctgggtcgccgccttgctggcgacgctgctgggcatggagcgtttgttcgaatccgatttccgcgacggcagcctggaagttatcgcgctcgcgccgcagtccctgaccttgatggtgctcggcaaggtgaccggcttctggctcggggcgggcctgccgctggtgttgctgacgccactgcttggcgttcagctcggcgtgcctgacggcgagctggcacaactggcactgtcgctgctgctcggtacgccgacgctgtgcctgatcgcggcaatcgctgccgcgctgacgctgtcgctgcagcgcggcggcccgctgctggcattgctggtgctgccactggcagcgccggtactggtgttcggctgcggcgtcgccgccgccagcactgcggcggaattgcaggcgaatctttcgctgctgggggcatgcctgctgactgccgttgcgtcggcgccatgggccaccgccgcggcgctcaggattggattggagtctgtctgatggccaccttgaatatctggaagtacgccgcgccccaagccttctatccgctcgccgggcatctggtgccatggtttggcgctgctgccgcagtgtctggcgcgatggcgctataccttggcctggtggtggcgccgcccgatttccgccagggcgaggtgtaccgcatcctgttcatccatgtcgcggccgcctggatgtcgatgttcatctacgtggtgatggccgtctacgccgggcttggcctggtgttcggcacccgtctgtcgtcgctgatggcaaccgcgctggcgcccagcggtgcgttgttcaccttcctcacgctgtggaccggcgcactttggggcaagccgacctggggcacctactgggtatgggacgcgcgcatgacctccgagctgctgctgctgttcctctatctcggcttcatcgcgctgcaggccgcgatcgacgatccacggcgcgcagccagggccggcggggtgctggcgctggtcggattgatcaacctgccggtcatctatttctccgtgacctggtggaacacgctgcatcagggggcatcggtcagtctgaccaaggcgccgcagatggccggcatcatgatcgttgccatgctgggcatgaccttcgccttctggatgtatgcgatcgccgtcgcgctggcgcgggtgcgctgcctgatcgcgcgcagcgaggccggccgcaggtggtggcggcaaggcgaggacatctgaaaccgacgcgcactcggatcaacgcgctcaacagcagggagggaatgatggatctgaatggatttttttcgatgggtggccaaggcgctttcgtctggggcgcatacggcgtgacggcgctgctgttcgctgtcgaagtcctgctggtactgcgctgcggcgtgtcgactcggcgcacgctggcagatgcgcaccccgccgcgcccggcatgcggctgcaagagcaacggggtacgcaatgaggatgctcaacaaggcgcgcgggcgacgcctgctcatgatcgccgtgggattgctgttgctttggacggctgccgcattgatcctgaatgccttccgcagcaatatggtgttcttcttctcgccaagccagctcgcggcaggggagggcccgcgcgacaaggccttccgccttggcggcatggtcgagcgcggcagcctgcggcgcgccccggatgggctgggggcgtccttcatactgaccgatacggtcaaccgggtgcaggtggtctaccgcggcatgctgcccgatttgtttggcgaagggcagggtgccattgcgttcggccgcatgggtggcaacggcatcttcgcggccgaggaggtgctggccaagcatgatgaagtgtacatgccgccggaggtcgccgcttcgctcaagctcgccgaagcggcgcagaaaggtggggccagatgattcccgaactcggtcaatggtgcctggcgcttgcgctcgcgctggcgctgtcgcaagcggcgctgccgctcctgggggcggtgcgcggcgtcgatggctggatgcgcaccgcacatgccgcagcacgcatgcagttcctgtttctctcgctggcctttgttttcctgtcggcggcgctgctggggaacgatttttcggtgcgctatgtcgcaaaccactcaaacagcagcctgccggcgatctatcgctttgccgccgcctggggcggccatgagggatcgttgctgctttggtcactactgctggcagcctggtcggccctggtgagctggcgcagcgacagcctgccgctgatgttctcgtcacgcgtgctggccgtcctgggcatcgtgtcgagcggcttcctttgcttcatgctgttcacctcgaatcctttcgagcgcctgtggccggcgcccccggacggcggtgacctcaacccactgttgcaggacatcgggctggtgatccacccgccgatgctgtatatcggctatgtcggactggcggtgcccttcgcgttctcggtggcctcccttctgaccgggcgcatcgattcactctgggcacgctggtgccggccatggaccatcggcgcctggctgttcctgacactcggcatcgcccttggcagtgcctgggcctactacgaactgggttggggcggctggtggttctgggatccggtcgagaatgcttccttcatgccatggctgcttgccaccgcgctcatgcattcgctggcggtcacggaaaagcggggcatattcgccggctggaccctgttgctggcgatcgccgcctttggcctgagtttgctgggcgcctttctggtgcgctccggcgtgctgacctccgtgcatgcctttgccgcggatccggggcgcggcgtgttcctgctgtcattgttcgcattcatcgtcggcggcgcactctgtttgtacgcgtggcgcatggggcgcgtgcggagcagttcggcgttcgcgccgttctcgcgcgagggggtgctgatgctgaacaatctgttcctggccgtagcaaccgcgtctgttttgctgggcacagtctatccgctggcgctcgatagcctgggcctggcgaagatatcagtcggtgcgccgtatttcgaggcggtgtttgtgccgctggtcgtgccaatgctgtttctgatgggcgtgggcccgctgatgcgctggaagcatgcttcgctgccggatctgaagcgtcggctgaaatgggcgctggccgcggcgcttgcctttggcctggtcacgccctggctgctaggcacatcgagcatcggcatcagcctcggcctggccctggccggctggatcacctgtgctctggtcgcgaccgcggccgagagcgtgcgcgaccggcgcggggcaggagcgttgcgcagtctggccgcccgtccgctgtcgttccacggcatgttgatcgcgcaccttggcattgcagtgtgcattgtcggggtcaccatggtcggcggctatgcaggcgaacgcacggtgagcatgtcggtcggcgactcgctcgagttccgcgactaccgcttccgcttcgactcggtggaaacactggcgcgcgacaactaccaggcccggcgcgcgagcattacggtgacgcgagacggccagctggtgacattgctgcggccagagaagcgcttctatccggttcagcgcaaggtgatgaccgaggcggcgatcgatcccggcctgacgcgtgacctctatgtatcgcttggcgaagcgttgcccgacggtagctggactttgcggctttaccacaagccgttcataagctggatctggtccggctgcctgctgatggcatttggcggcttgcttgcgctcggcgaccgccgctatcgggcgcgcatcgcgccggccgccacgccgctgaacctgggggtggagtgatgcgacggtttgttcctgctgcgatcttcatcatgctcttgctgctgctcggcctcgggcttgcgccgagaccaagcagtccgccatcccccctgatcggcaagagcgcgccggctttcaggctgcccttgctggacgcgcctcagcaaactgtggcgcctgccgatctgtgcggacaggtctgggtgctgaacgtctgggcatcgtggtgcggcgcctgccgcgaggagcatccgaagctgatggagctggcgcgccttacccgggtgcccatctatgggctggattacaaggatgggcgcgacgaggccggtgcctggcttgcgcggcacggcaacccttatcgcgccagtctgttcgatgccgatggccgggtcggcatcgactacggcgtgtacggtgttccggaaaccttcgtgattgaccgtcgcggcgtgatacgccacaagcatgtcggtccgctgaccgaggaggtggtgcgcaaagaactgttgccgatgttggcggcgctcgagaacgagccggacgtagcactggcaagcaggggaaaagggggctgacatgaaatcaagcgttcgccggtggtgcgtacttgggtgtttgctgggcggtctgctggccaatgcaatcggcgccgagccggcacaggccgatgccgagcaggctctgcaggcccgggtcacgaggctggccgtcgacctgcgttgcgtggtatgccagaaccagtcgcttgccgattccaatgccagcctggcgattgacttgcgcagcgagattgccggcatgctgcgcgatgggaaaagcgagcgcgatgtgaccgagttcatggtgcagcgctacggcgatttcgtgctgtacagcccgccgctgcagcccaccacctggctcctgtggcttggcccgttcctgctcatgttggtgggaatggtggtgctctaccggcatgctgccggatcgcgggcacgcgagcgggcgggtaaggctggcggcagcgaggagggaagcatatgacatcggcgcaggtattctggggattcgccaccgccctgaccattggtgcgctgctgaccgtattgcagccaatggtggcaggtatcgccgttgcgaaaggccgggcgcgccgggttcagttcctggccgggctagctatcacgctggtggccctggcagggtatcttgctgtcggccggccggacctgatcgggccggaatctggcagcgggtcaggagcaacgccgcgggaaacgtcgattccgcatctgatcaagcgtcttgaggcgcatctgcagcaatggcctgacgatgccgatgccgcactgttgctcgcgcgctcatactatgccgcagcccgtttcgccgaggcggtgccggcgttcgagcgcgcattcgtgctgaaggcacccgcggcaccgcagcttgccgattatgccgatgcgcgtactgcgcaaaatgggggcacttttgatgcgcaggcacagaaggctgttgaacgcgcgctggcacttgatgcgcagcatgtgaagtcgctgtggctggcgggcagctttgccttcaatgaccggcgccctgccgacgcgattgtttactggacgcgcctggcgccattgctgccagccgattccgaagagctacgccgtctgcaggccaacattgccggagcgcgtgcgcaggtggggaccggttcggctgttgcgggcaacaagaagcagctttccggcaccgtagcaattgcccccgaattgcaggcgtctgttggcagtaccgacacgctctacgtattcgcacgcgggctgcaagggccgccgatgccgctggctgtcttcaaggcagtgcctggacgctggccggtggcgttttcgctggacgagagcatggcggtgatgggcggtgcgcgcctgagtgagcgggaaagcgcgatggttgtcgcacgaatctcacgttccggccaggcgatcggccagccaggcgacctggaaagcggggcggtacaggtgaaggtgggcgctgctggcatccagctgttgattgatacggtaaggaaatgagggttgatccgcgacgatcatagggtagacgaccagctgccgctgcccacaacgccgcccagcgtctcagtagcggattctgtggtcccgcgatgtgctgcttgatcgcaacttaatggattgcttatgcgtcggctaagaatatatgaatttaccttaactgggtgagcagatatctttccagcattgccgccacgccgccaaagcacgcctggtgcatgcatccctacattcaccagcagcggagtatgtcttgagcgtcagcactgagcaggtcaccgaagccctgcgcaccgtcatcgaccccaatacgggcaaggacctggtgtccacccgctcggccaggaacatccgcgtcgacggcggcgatgtctcgctggaagtcgaactcggctaccccgcgaagagccagttcgatccgatccgcgagctggtggttgctgcggtgcggcaagtgccgggcgtgagcaacgtcagcgtggccgtgaccatgaagatcgtcgcgcacgcggtgcagcgcggggtcaagctgctgccgggcgtgaagaacgtgattgcggtggcgtcgggcaagggcggggtgggcaagtccaccacggctgtgaacctggcgctggcgctggcggcggaaggcgcgcgcgtcggcatgctcgacgcagacatttatgggccgagcctgccgatgatgctgggcatcgacggccgcccggaatccgccgacggccagaccatggagccgctggaagggcacggtctgcaggccaactcgatcggcttcctgatcgagcaggacaacccgatggtatggcgcggcccgatggtcacctcggcgctggagcagctgctgcgccagaccaactggcacgacctggactacctgatcgtcgacatgccgccgggcaccggcgacgtccagctgacgctgtcgcagaaggtgccggtcaccggcgcggtgatcgtcaccacgcctcaggatatcgcgctgctggatgccaggaagggcctgaagatgttcgagaaggtgggcattcccatcctgggcatcgtcgagaacatggcggtctactgctgcccgaactgcggccatgtcgagcatatcttcggccacggcggcggcgagaagatgtgcgccgactacggcgtcgacctgctgggcagcctgccgctgaacctgcagatccgcgagcaggccgactccggccgcccgaccgtggtggccgagcccgacagcccggtggccgggatgtaccgcgccatcgcgcgcaaggtggcgatcaaggtcgccgacaaggcgcgcgacatgaccagcaagttcccgagcatcgtcgtgcagaacacctgaccagggtgagcgatttacgcgcggcgcccgtcgcgcgctgacatggagcaatggcatgagacgccttcgcaacgccaagatcgtggccacgctgggccccgcgagtagcacccccgagctcatcgacgcgctgttcgaggccggtgccgatgtcttccggctcaacttcagccacggcacccacgaagaccaccggcaacggttcgaagcgatccgcgccgtggagcgcaagcgaggccgccccatcggtgtgctgctcgacctgcagggtccgaagctgcgcatcggcaccttcgccgacgggccagtgcaactggccgcgggagccggcttccggctggacctggacagcgcggcgcccggctcggccagcagggtctgcctgccgcacccggagatcttcgccgcgctgagcgaaggcgtcgagctgctgctggacgacggcaagatccggttgcgcgtcgagcagtgcggcgccggcttcgccgagaccacggtcgtcaacggcggtacgctctcggaccgaaaaggggtgaacgtgcctgatgcggtgctgccgctgtcggccatgaccgaaaaagaccggcgcgacctcgacttcggtctggccctgggggcggactggatcgcgctgtccttcgtgcagcggcccgaagacatccgggagatcaaggcaattgtcaacggccgcgccggcatcgtggccaagctggagaagcccgccgccatccagagcctggatctgatcgtcgccgaggccgatgccatcatggtggcgcgcggcgacctgggcgtggagatgccggccgagcaggtgccctcgctgcagaagcagatcgtccgcgcatgccgcaaggccggcaagccggtcatcgttgccacgcaaatgctcgaatcgatgattgccgccccggtgcccacccgcgcggaagcgtcagacgtggcgacggcgatctacgacggtgccgacgcggtcatgctgtcggccgagtcggcttcgggccggtatccggtggaggcggtgcgaatgatgaacagcattatctcccgcacggaatccgacccgctgtaccgcgacgccatcgaggcatcccacacgccgccgcgcgcggacgcggctgatgccatcggttatgcggtgcggcatatcgtgggcttgctcagggtgccggcgacggtcgcctataccagctcgggctattcggcgctgcgtatggcgcgcgagcggccgcaggtgcccattctcggcatgacaccgcgcatggcgacggcgaggcggctgacgctcacctggggcgtgcatgcggtgctctgccacgaggtgctggatgtgccggagatgaccgatctggccagccgcactgtgctggcggagggcttcggggaagccggacagtccgtcgtcatctccgcggggctgccgttcctggtggcgggaaccaccaacctgctgcggattgcgcagatccaatgagggggtagggacaccgccgaacaggtacgacccggggcattgccgcagcgttgcacggtccccgctgacagaggccactgccacctccgtcagcgggccgggccgctcccctcctgacctcgactcccccctcgaaagaggtaggcaatgctgaggcttggctcatttgccccgactctcgttgactacggctttggaagcccccggcggggccattgttatttagccgaagaccgggcaaatgatggccatgatggtatcgaaaccgtgcaaaagtcataccctgccaatcagcagggtgcctttgacggcgcgcaggcatgagtggcgcggttaaaggccttccggctggccagccatgcacggttttatcgatgccaacactgtacatgcgctggcgcgtggtctagtcttcacgttgacccgcgttcggctgaaatccgggcgaaggggccaatcaaggcgccagtaaaagcgccagtatcgggggtctggactgccatgagtatcgagatcggaaaagacatcactgcgtttgccgaccaactgctggacgccgtattcctggtcgacacaggcggccgcatccagtatgtcagcgccgcgtgcgagggcatttttggctatacgccgaaggatatggcgggcgagttcatcatcgatctggtcatgcccgccgaccgggaccggaccattatcgaggccaagcaggtgatgtcgggaaagaagcggatcggttttgaaaaccgctatcgccacaaggacggcagtgccgtccatatcatgtggtccgccggatggctccagtcggaacggttgcgcgtcggggttgcccgcgatgtcactgcgctgaagaaggagagcattcttgaccttgggctggcgctttcttccgttccgttggcgccccacgagcagaaggtcttgcggctgctgttgaccgacgcatcggaaaagcagattgcccagcgcctcggcctggccgtttcaacgacccattcctatgtgaccggcattttccggaaattcggcgtcaggggccgggcggggttgatgagcctgtggctggaaaatctgaccagggactaaatacgcaatatagattgtatttctcgaatacaaaccatgatctgtattggtcagaaacttcgtccccgcgcctcataaatcgcttatctctaccggcgccgccatcagcgcctgaccagcgaacactgcgatttcgacaccggcatgaacgcctgctcgcccggcaccgtggccagcaccttgtagtagtcccatgggtacctggactcggccggcgtcttgacctcgaacagatacatgtcgtggaccatgcggccgtcttcgcggatgcggccgttctttgcaaagaagtcgttgatcggcatcgacttcatcttcttcatcaccgccgcggtctcgtctgtgccggctgcctgcacggccttcaggtagtgcgtcaccgatgaatacgcacccgcctggctcatgttgggcattttcctgagcttgtcgaaatagcggcgcgaccaggctcgcgtggcatcgttcatatcccagtagaaagcttcggtcagcaccagcccggaggccgtcttcaggccgatggcgtggatgtcgttgatatagagcagcaggcccgccatgcgctgcgtgttgttgcgggtcaggccgaattcggaggcggccttgatcgcgttgacggtatcgccgccggcattggccaggcccaccacctgtgccttgctggcctgcgcctgcagcaggtaagaggcaaagtcgctggtggccagcgggtggcgcgcggcgcccagcaccttgccgccggtctcgttgacgaccgcggtggccgagtcctgcagcgtgtggccgaaggcgtagtccgccgtcaggaagaaccaggacttgccgccgcgctgcaccatcgcgcgcgcggtggtgttggccagcgcgtaggtgtcgtaggcgtagtgcactgacaccggcgtgcacaggtcgttggtgatgcgctcggtgcccgggccggagaacaccacgatgcggttcttctgtcgtgcaacctcaagcaccgccagcgccggcgcagacgcggccacgtcgaggatggcgtcgacattggcagtgtcgaaccattcgcgcgccttgttggcggcgatgtcggccttgttctggtgatcgaccaccaccagctcgatcttcttgcccagcaccttgccgccgaaatcgtcgatggccatctgcgcggcggtggcgctgccgcggccggtgacgtcggcatacaggccgctcatgtcgagcagcatgccgagcttgacgacatcgtcagagacggcggccctgggctgggcctgggcggtgccgcaggcaagcgccgcggcgaaggcgagggcgctggcggcaatgcggcggagcgcgtggcgatggttcatggtgtctccctggtttattgttgttggcttataccgtggcgatcggcgtcaccggcgaccccaccgcgccgggcaggcgcaacggcggggcggtgagctggaagcgggtgcggccgttggcgcgcaaccagtccgccagctcgcgcaggtaccacagctcgcccagcggtaggcccagcttgaacaggcaatggtggtgcagcggcagcagcgggtggctcttgtcgccgtcgggcgcggggcgggcggggtagcgttccaccgcgtagttgtcggcgatcagcgcggcgatgccggcatcggtgatccagttcagcaggcgctcgtcgcggccgtccagcgcgcagcagctgtggtgcagcacggcttcatcgggtttgcgctgcatcgacagcaccacctcggcaaagccggtgcgcagcagcagcatgtcgccgcgttcgacttccacattgccggcatccagcgcgtgcatcaggtcgtcgtagccgacattgcggaagtccatgccgaaggtatgcgccaggtccaccagcacgccgcggccctgcatccccttgaccgcgaagttctcgatgcccagcgcctgcgcggcactgtggtcgtggccgcaagggtgcgcggcgaagttgtcatcctcggcatagtccaccgggccgacgatatgctcgttggcgcggtagccgttgtagtacacgcgctccgggcggccatcgccgtcggcatcgaacagcgcccccacgtgcgccagcgcatcccattgcgtgctgtattgcaggcacagcagcacctggtcgtcgctgatgacgtcggtggcggtgggatcgaccttggccagcgggaagttcaaataggggatgtcgtcgcgcagggtaggccgcagcaccggcggatgccggcgcgggttgagcttgttgccgccggggtagtccagcggcagcgacaggcagaagctgatgccggcctgcacctcgcgcgcgcccttgacgacttgttccgggccgatcaggttgatgcggccgagctggtcgtcggggccgaagtcaccccagttggaaccttgcggacgttgcttccagcgcatgagtcatgcctcctgtcgtgtgcgtggccgagggagcggccggtgtatggggtatcggtgcggcgtggttgcgcgatgcgcgtggccacgcgggaaggtctcctgtccggttctcgtggcatgaaaccggttgcatcccttataggccatattgcggggaatggtcattttgcggtgcagcaggattacggcgaggcggcatccttatagaggcgggcaatgccggttcatgatgtgttatcgtacaactaggttggggaagctgcttatttccgcctaaaaatagtagagaatagggaattcccggggccgtagaccaccataaacggatggcaagttgtcagacaacgtaacactaaaagtgcgcaacgcgcacccggctggagatgacatgacagtgaccccgacagcaggtggacaggcggctcgcccgctgtacatcacgatgcacgcgaacgacaacgtcgcgatcgtggccaacgacggcggcctgccggcgggaatggaattcccctgcggcctggtgctggccgagggcgtaccccagggccacaaggtggcgctgactgacctgcgcgagggcgacgcggtgatccgctacaacgtggtgatcggctatgctctgaaagacctgccgcgcggcagctgggtcaatgagcgcgtgatccgcatgccggccgcgccggaactgcacgacctgccggtcggcacgcgcgtggcgccgctgctaccgctggaaggctataccttcgagggctaccgcaatgcggacggctcggttggcacacgcaatatcctgggcatcaccactacggtgcagtgcgtggagggcgtggtggagtttgccgtgcggcgcatcaaggaagaacttctgccgaagtatcccaatgtcgacgacgtggtgggccttgagcacacctacggctgcggcgtggcaatcgacgcgcccgatgccggcatcccgatccgcaccatccgcaatatcgcgctgaaccccaatttcggcggcgaggtgatgatcgtcagcctgggttgcgagaagctgcagccggcgcgcctgatcggcgccggcaccatcccgatccagcaggagggcgagcccgacgtggtctgcctgcaggacgagcagcacgtgggctttgcctcgatgatcgattcgatcatggccacggcagagaagcatctggcccgcctgaacgcgcgccggcgcgagacctgtccggcgtcagacctggtggtcggcgtgcagtgcggcggcagcgatgccttctccggcgtcaccgccaaccccgcggtgggctttgccaccgacctgctggtgcgcgccggggccacggtgatgttctccgaagtgaccgaggtgcgcgacggcatcgaccaactgaccgcgcgcgcggccacccccgaggtggccgaggcgctggtgcggcagatggcctggtacgaccgctacctggagcagggcaaggtcgaccgcagcgccaacaccacgccgggcaacaagaagggcggcctgtcgaacatcgtggaaaaggcgatgggctcgattgtcaagtcgggcaccggcccgatccacggcgtcaccggccccggcgagaaggtcacgcagaaggggctgatctacgccgccacgcccgcgggcgattttgtctgcggcacgctgcagctggccgccggcatgaacctgcacgtgttcaccaccgggcgcggcacgccgtacgggctggccgaggtgccggtgatcaaggtgtccacccgcaatgacctggcacggcgctggcatgacctgatggatgtcaacgccggccgcatcgcgaccggcgaggccaccatcgaggaagtgggctgggagctgttccacacgctcctggccgtggccagtggcaagaagtcatgggccgagcactggaagatccgcaatgcgctggtgctgttcaacccggcaccggtgacctgagcctcggctctgacggcgctaggtgcgcccgcgcaacggcctgagcagatgcgacaggccgttgtggtccagctcatgcatcagcgccagcagcgcgccgatctgccccggcgggaagccctcgcgcgcgaaccagttcaggtagttgcctggcaggtcggcgatcaccgtgcctttgtgcttgccaaagggcatggtgactgtgaccagccgcttgagggcgtcggcgtcgaaatcgttcatgggtggcggaaagtcggaaggctccacgctatcacagtcagcaagccgcactacctggcggtcatctcccactttctcgcgagtccaagccgctcgaatcgttcgaacaggaagtcgatgaagacgcgaatcctggccggctggtggcggcggcactgatacgcgacgttgatcgtcagcttgggcagttgccaatccggcaggaccggcaccagccggccggcaacgatgtcttcgtagatgatgtagagcggctgtaccaggatgccatggcccgccagggccgctgcgcggatcacctggccttcattggagtcgagcacgctggtcacaggtacggttgccgtttcgtcgcctcgccggaagtgaagcaggtagggatcattggcaaggttgtaaatgagcatctgatgctgccgcaaggcatctggcgcatctggcatgccgcgctcggcaaggtagccaggcgacgccgccagtacgcggcgcgtctcggccagttttcgcaccgtgatccctgaatccccctcatgttcgcgtgtccggatggcgacatcgatcccggcctcgataaagtcaggatagcgattggccgcaatgatctggaccgccaggttcggatagcacgcccgaaatgccggcaatgccggcgcgagatggatcatcgcgaaggatgccgatgcggtcacgcgaagaacgccggttggattgagcgtggcctcgttgatggcggcctcggcttcggccatttcagccagcatcgcggcacagcgccggtgatactcacggccggcatccgtgagccagagccggcgcgtggtgcgctcgaccaggcgcgctcccaggcgctcttccagcgcattgaggcagcgggtggctgccgcactcgacatgccgagttgctccgccgcctttgtgaggctgccgagttccgcaacctgcacaaaaaactcaatctgcgtccacttgtccatcaattcttccggctagaggagaacactacttcgctgccacctctttttacctgtggaggaaggaattaatgttagcagcaagcgagaagcagaaaacatgcggagacacccggaatgcgaaacctcaatgaagacacgatcacgcaggcggtgcttgcgtcgatggcgaactgccgcgatgcgcgcctgcgcaccgtgatgaccagtctcgtccagcatttgcatgccttcgcgcgtgatgtgaagctgagcgaggaagaatggttcgcggccattcgttttctgactgcggtgggccatatcaccgatgacaagcgccaggaattcatcctgctgtccgatgtgcttggcctgtcgatgctggtgacggcacaaaacaacgtgaagccggcaggctgcaccgagtccactgtatttggcccgttttacgtggaagacagtcccgcgtacgacagcggcgcggatatctcgaatggcgcgcaaggcgagccctgctttgtgcgcgggcaggtgcgggactgggaggggacggccattccggatgccaccatcgaagtctggcaggcggaccagcacggccactatgacgtgcagattccgggccctgacggcgcgcatacccaccgtgcgcgcgggcgtttgcgaaccggcgaagacggcaggttttcgtttcgctcgatcctggccgaaccctatccgattccgcatgacggcccggtcggcgcgctgctggaggcgcttggccgccatccctggcggcctgcccacctgcacttcatgatcagtgcaccgggttgcgagacgctgattacccatgtctttcgcgacggtgaccgctacctcgactccgacgccgtgttcggcgtgcgctcgacgctggtggctgactgggtgcagcacccgccgggcattgcgcctgatggcagcttgctcgaggacccttactacaccctcgattttgattttgtcctgagccgcgcgcacgaacggaaatgatcaggcacatcgtcatgtggaaggtgaagggtgagacggcgcatgaacgggctgatgcccagcaacgcatcaaggcggccttcgaggccttgcccggccgcattccaggcctgcgccacgtggaggtcggtatcgacgtgagccgcgttgactacgcgtgcgacacggtgctgcttgccgagttcgaatcgctcgcggcgctcaaggcctacgccgatcacccggagcaccttcacgtccgcgagcagctggcagggctgcgcatcgcccgccaccaggtcgactacaccattgattgagggatgcaatatggaaacagcactggaattcgtctaccaggcagcgcctgccagagtcgtatttggcgcgggtagcctgcagcacctggagcgcgagatcggcttgctcggcgcgcagcgcgcgctggtcttgtgcacgcccgagcagcgcgatggggcgcaggcaatcatggcatcccttggccagcgcgcggcaggcctgttcgaccgtgcagtcatgcatgtgccgatcgacacggcccgggaagcacgcgagcttgccctggcctgcaatgccgactgtgccatcgcgtttggcggcggttcgacgatcgggctcgggaaggcgattgccctggaaagcagcattcccatcctggcgatccccaccacctatgccggcagcgagatgaccccgatctacggcgttaccgagggcggggtcaagcgtaccggcagcgatatgcgggtgctgccacgggcggtgatctacgacccggaactgaccctgaccctgccggtcgacctgtccgtgaccagcggcatcaacgccatcgcgcacgccgccgagggactctacgccagcaatgccaatccgatcaccagcctgatcgctgaagaaggtatccgtgccctgggccagggcttgcctggcatccatcgcgacgccgccgatattgtggcccgcggccaggcgctctacggtgcgtggctgtgcggaatggtcctgagcaacgtcggcatggcactgcaccacaagctttgccacacactcggtggcagcttcaacctgccgcacgcccagacccacacggtggtgctgccacacgcactggcgttcaacgcggactttgcgccgcaggcaatgcagcggatcgcccgcgccctgggcactgacaatgccgcgcgcggcgtccatgacctggcgagcaagctcggggcgccgacgtcgctgcgtgaactcggcatggcgcacgcagacctggaccgcgccgcggagatcgccagcgccaatccctactggaatccgcgcccgatttcccgggaggacttgcgtgcgctgctgcaggacgccttcgacggaacgcgtccgtaatgcgcaactcgccgagctgccacgggacagcgtcccccaaaaccaatatagatggagacaaagcatgagcatcaatccgaagcaaacacccgagccggccgcagaaatcttcgacgtagccgtgatcggatatggcccgaccggactcgtcgcggcctcgctgctgggcgaggctggctacaaggtggttgtcattgaacgctggcccacgccttatggcctgccgcgcctgacccatatcgatggcgagacggcacggatcgtccaggcgtgcggagacgttgaccaggccctgcgcgatgcctgtgggctgggtccgtatcagtatcgcaacgccgacgatgagctcctcattgaactggactggaccgggcacgcgtgcggcttcccggcccatatctcgatttaccagcccgatatcgaagacgccattcatcagcgcgcggcaagctttcccggggtcgagatccttcgcggctgggaggcagagacgctcaggcaggacgaggatggcgtcaggatctccgcgcacctctggcgcggcgcgcaggactcgcaatggacgacaccgtcgcgcgagttcatcgcaaagtacgtcattggcgccgacggggcgaacagctttgtccgccgcagtctgtgcatcgaacgcgacgacttcgggcagaacgagcgctggttgaaccttgactcggagaacaagcgggaccttggcgagaagttctcgctcacgaccatctattgcgacccggcgcgggcccatatgtacatgccgatcggcacccggcggactcgcttcgaactgcgggtgctgcctggcgaggatactgcctactgggaggacgaggccgtcggctggcgctggctgaaggagcagcatggcctgggcccggaagacatgcgcctgttgcgccatgtcgtctacacattcgaaacccgcatggcgcaccggtggcgcgacgggcggatcttcctggccggcgatgccgcgcatacgatgatgccctatatggggcaaggcgcgtgttcgggcatgcgagacggcatcaacctggcctggaagctggacctggtgctcagtggccgaagcgcgccgggtctgctggatacgtatgaagaagagcgcaggccccacgtcagcaagatcatggagatggcgagattccttggcaaggttgccaacgaagacgatccgcaaaaggttgccgagcgcgacgccgcattccgggcccggtcgatccccccgatgccgccgtttccgaggctcgaagccggcatcgtgcatgccgaggtggatggcagcctgttgcccgcgatcggcacgcccgctccgcagggacgcgtgcgcaagggggaagtcgaagggcgcctcgatgacgtggtcggtcatggcttcctgctgatcgctcttgacgatccgttgcgctacctcgatgaaggccagctcggtttccttgagcaactcggctgccatatcgtcgtgctgtccgacgcggcgtcgatacccggggcagtggtggaactcaatggcgcgcaggcagcgttcatgcgcgcgcatggcatgcaggcttacatcagccggccggactttgctgtcttcggcggcgtttccgacctggcgcatctgcccggcctggtcgattccctgcgccagaagctgcactggcgcggtgcggcgcaatccagcatgctggccgggaccagcgcagcggctgtttcgtgagcgcgggagccatgatgacgacaacggtttcttcggcagcgcttgcgttccagcgggcgatgccggtcacacgcttgctggattgcggcatggactatgccgacgccgtccggctgttcgacgccaccagccggggagaggattgggatcgcgtggccgagtcgctcgccgatgctcagctggagcgcgccgagcatgctgccagggccggccacctggtgacagccgcccaggcccagtccatggcgattgccgacctggtctttgcgcagatggccttcaatcacgacgcgccacgcaaactcggcttgtacagtcgcctggtggctgcgacgcaccagctttgccactggtccgcacaaggcctcgagcgcgttgagctttcattcgcaaatggtcgcctgacagggtggctgatgcgcccgccagccggccacgcgcgcggcaccgtgctgctctttggcgggcagagcggctggggggtggcatacctgccgctggcgcgggccctggcggaacgcggtctcgccacgctgatggcggaaggcccggggcagggcgaaacccggctggtccacggcattcatgtcgacgtggatattcccgcggcctaccggtgctttgtgtcacggatagccgaggatgcatcgcttggcgtccccggcatctgggggaacagcgtgggcgggctctgggcggcagccacggcagcgacggacgacaggatccgggcgtgctgcatcaacggtgccctcgcagctcccacactgctgccgttccggacgttcgaggagcaggcagccgccatgctgggcagcacgaaccaggcagccatccaggccaatttcgaacgcatgcgctttcactcgcaccgcgacaggatcgcttgcccgctgctcgtgctgcatggcggcgaggatccgttggtgaagctggaagaccagcagccgttcctggacgcggcgctcacggacgacgtgacgctacgaatctggccggatggcgagcatacgatctacaaccacgcggccgagcggactgcactggtggcggattggttcgcggaccggctctgctgaatggacgccgcgcgccgtcaagcgcgccggatcttcgcttcttccacagccgcgcgcacgcactcggccagcaactctgacgcgcgggtgcgcgtcgcgcgggccgtgcgcgcgatcaccagcggctggcgcacggtatcttcccgtatcggcttttccacgacggcggtgatctgggacgacgccggcgcctgcgtgatcagcagcgccgcgcccagtccgttcgccaccatgccgcgcgccagttccagcgaagtcgcgcggtagcgcacctcgggctgcagcccgaattgccagaacggcgccatcaggaattcacggctgtgcggcaggtcgatcaggatcagcggttcctgcgccagttcgtgcagcgacaggctgcctttgcgcctggccagccgcgagcccgcgggcagcaggccgtagggccgcagctctgccagcagttcgcgctcgatgtcttcgggcatgcctacgtcgtaagtcagcgccagctcgatctgcccgccgtgcagccagtcttccagttgtgcgagatccccttcgacaaagcgtaccgacagtttgggatagcgctcgcgtgccaggcgcagcaccaccggcagatagaccggcgccagcgtgcggaagacgccgatctgcacctcgcccgcggcggcatcgccgctcttgtccacttcaaatgctgttgctgctccgaggatgtggcgcgcttccgccagcttgcgtacgccgaagcgggtcagggtcatccttgcgccgacatcacgggagaacaaggcttcctcgaacagcgtctccagttcgcggatggcaacggagatggagggctgcgagacgttcagcagccgcgcagccgccgtggtgctgccggtttcggccgccgcggcgaagtagcgcaacagccgcaaggagacgcgcatcagaaaatcctataggtgctagtcgaattcaatattttacttgatagcctgcgctgcgcagaatcggtgtcactgaaacgcaagcccgcgggtttgcaagcctggaggccaagacgtgactcattccgacctgccgcttgccggcatccgcgtgatcgatttctcgcgcgtgctggcgggcccttactgcacggcgctgctcggcgaccttggcgcagaggtgatcaagatcgaaccgcctggcggcgatgactaccgcgcggtcggtcccttcgtcgatggcaagagcggtctgttctctgccatgaaccgcaacaagcagagcatcgtgatcgacctgaagacggcagcgggcctggagctggcgcgctcgctctgcgcccgggccgacgtggtggtcgagaacttccgcccgggtgtcgcggacaagctgggcatcggctatgaggcgctgcgtgcgctgaatccgccggtggtctacgccagcgtgtcgggcttcggccagaccgggccggaatcgcaccgtccggcctacgacatcatcctgcaggcaatgtgcgggctgatggatgccaccggcgccccggacggcaccccgaccatgctgggcgaggccgtctccgatgcggtcagcggcctgttcgcctcatggggcgtgctggccgcgctgctggcgcgcgagaagaccgggcggggcacgcatgtcgatgtctcgatgttcgacgccaccctgagcctgagcgccaccctggtcgcgcgctatgccgcgaccggcctggcgccgctgcgcgtcggcaaccgccatccctcgtccgcgccgttcggcgtgtaccgcgccgcggacggcttctatgtggtggcggtgctgaacaacaagctgttccaggcgctggccaatgccatcggccggccggagatggcgcaggacccgcgctttgccgacgacgagacgcgctgccgcttcgagggcgatctgcgcgccggtctcgaagcctggtcggccagccgttccgtggccgaggtgaaccgcctgctgagcgaggcgggcatccctgtcgcgcctatccgcaacgtcaaggaagccctggagagcgaccatgccgcccaccgcggcctgcttgccgaagtgcccgggccggagggcggcaccgtgcggttgccgtcgcagccggtgaagttctccggctacggcgccaaccgcgtgacgcccgcgccggcgctggggcagcacaccgaagccatcctggccgagctggccaacgctgccacggcgcatccgcaagtgttcagcaaggagaaacaacatgcataaacgactgggcgtagagccgggcgatcttgagattgccgatgccatcggacgcttcgcgcaaagcgaactggcgccgaaggcggccgaggtggaccgggccgaagcctccaccacgtgctatgtgccgcaacttgccgagctcggcctgatggggatgaacctgccggagcgctggggcgggaccgagacttcgccggtggcactgatcctgtcgttggcggaggttgccaaggcctgcgcctcgacctcgtcgatgatcggcgcgcactacctggctaccgattccatcctgatcggcggcgacgacagcctgcgcgagcgccacctgccggatgcggccgccggcggcaagctgggcgcctttgcgctgaccgagccgcgcgccggctccaacccggcggacatggccacgcgcgccaccccggagggcgacggctaccgcctgcgcggggtcaagcacttcatctccaatgcggacgctgcggactttatcgtcgtctacgccaagaccgatcccgccgccggcacgcgcggtatcagcgccttcgtggtggaccggcacagcgagggcgtgcagatcgcgcccgccgagaaactgatgggaattcgcggggcgccggcccatgaggtggcgctggactgcttcgttcccgccgccaaccggctggggccggaaggcacgggcttccgtaccgcgatgaaggtgctggacaacagccgcctggacgtggctgccaccagcctgggcattgccgaggcagcgctggcgtgcgcggcggactgggccaggcagcgccaggtcggcggcgagccgctggcgcgcaagcaaggcctgcaatggatgtttgccgacatgcgcacgcggctggaggcggcctggctgctgaccctgcaggcggcggtgcggcgccgggacggagagcccttcaccgagcaggcatcgatggccaagctctatgcctcggagatggtcggctttgtcaccgacgccgcgctacagatccacggcggctacggcttcacgcgcgaaatgccgctggagcgcctggtgcgcgatgcgcggatcctgcgcatctatgaaggctcgtcggaaatccagcggacggtgatcgcgcgcgcggtgctggcgtaagcgccgctgcagatccgacggtggggatcagggcgtggcaggcgtgtcggggctgtcaggcgtggcgtcgggcgcggcaggggtgtcaggcgtggcagcgggcgtggcgggcttggctttccgcggccgggtgcccgcaccgcggcgggccttcagctgctgggcccgcttggcatccgccaggctgacgacgccggcctcattgccctccaggtccagccgcttggcgccttccaccatgcacgaccaatagcgtgcgccgctgcaccaggtgcggatcgcttcacgcagctccgcctcggtcagggccagcttgcccgcatgctgggccagatcctcgaacgtgccgaccttcagcggcaccttgggcgccgggttcttcggaaacgccttggggaagtgcttctgcagccgggcaatggaatgcaccacaggatcgacgggcggcttcgcgggtgccgcagcctgcgcggcagccggcgcagggcgccggcgcttgccttccgcccgtgattcggcctttgccttggattcggcctttgccttgtttgccagttgatcccttagtgctgcgagttgttcaaagcccatgatatttgccgttctgtgaaccagaattgtagcaaggctggcccaacgacaggtttggcggcattttgcatgcggcgggcatgggccgaatacgtctctcgctgccgcaaggcggggccggacagaagggctctcggcgggggcgccctcacgtgattgccctgagcaggcggaccatccgttcgaaaatcgaggagcagcggtggattcccatgccatgaacggtgaaacgccagacgcgtcgcatccgcagcaatcccgtgcagagctcacgcttgctgcgttgggcgtggtctacggcgatatcggcacgagccccctttatgcggtcaaggagaccttcaatccagcccacgggatcccgctcgtaaccgagaacatacttggcggtatctccgcgatcctctgggcgctgatggtggtggtttcgctcaagtatgtgatcctcatcatgcgggcaaacaacaggggcgaaggtggcatcatggcactgctcgcgctcgccctgtcgtccgtgaaaaaggtcggtcgctcgccgacgccgatcctgctggtgggcctgttcggcgcggcgctcttctatggcgatgccgtgctgacacctgccatgtcggtgctctcggcgctcgaaggcatcgaggtgggcactaccgcgctgcagccttatgtcttgccggcatccgtgggtgtgttgatcgcgctgttcctgttccagcggcatggcaccgccgccatcggcgcgctgttcgggcctgtcacgatcgtgtggtttctcgccctggccgccgcgggcatccacggcatcgcccggtatcccgcaatcctgggcgcgctcagcccgctgcacgcgctcggcttcgtcacgcagcacgggttcgcctcgttcgcggtgcttggggcggtgctgctcgcgttcaccggtgccgaagcgctctacgccgatatggggcatttcggcagtgccccgattcgcctggcctggttcgggctggtattcccggcgcttgcgctcaactacctggggcagggcgcgctgatcattgtgaatgcaaaagcaatcgagaaccccttctacctgctgtatccgtcgtgggccctttatccgatggttgcactcgcgacagcggcaacagtgatcgcgtcgcaggcgacgatttcgggtgcctactcgctgacgaaacagggaatccagctgggctatctgccacgcatgaacgtggtgcacacatcggagcgagcgatcggtcagatctacataccgactctcaacgggatgttgcttgttgcggttctggttgccgtgctcggcttcggatcttcgtccaatctcgcttcggcgtacggggtcgcggtcaccggcacgatgttggtgacgacgcttctcaccttctttgtgatccactacggttggcgctacaacctgctgctaagccttgtcgcaaccggcttctttattgcggtggatatggctttcgtttcctccagcctgttgaaagttgccgaagggggctggttcccgctcgttgtcggggctgggatattcgtcgtgatgctgacatgggttcgcggccggcaagcgctgttggagcggctccaaagtaccgacgtgcccctcaagtcgttcctggattcgctgtttctcgcaccaccaccgcgcgtgcccggcacggcggtgttcctcaccccgacaccggatgtggtgccacacgcgttgatgcataacctcaaccataacagggtgctacacgagcgcgtcgtgtttcttaccgtgaaaatgaaggatgtgccatcggtgccggcgaccgagtgcgcagccgttgagccgctcggacacgcctgctacaggataacgctgcgcttcggcttcatgaaccggcccgatgtcgcgcaggcgctcggcgctctgcctccggcggctggcctggagtttgacatcatggacacctcgtttttcctgagtcgcgaggccatcgtcgctgcagccggcggtcccagtggcatggcgtcatggcgtgaacgtctgtttgccacgatgagcaggaacgccggcaatgctgctgattacttcaacataccggcaaatcgcgtgatcgagattggcacgcagatcaagatctagaccgccggcggcacctgttctgcaaaggactccgtgccccaggcgtcccgtacctcggcagccagttcatcggcgcgcccttgatagcgtggcgaaaaatggaacggcgtcaccgcgcgtgcgcctatgctgcgcgcaatccgcccggcctgggcggcggtcaggtggttcttgcgcaggccgtgtgcccggtcgacatccaggaacacgctctcgatgaagagctggtcgacgccttgcatcagttgcgacaatgcttgcacgttcgcgctcgtatagcgcaggtcggtcacgtagccgatgcgcaggccgggctcggtatccaggatcagccggctcagctcgccgaccgttcgcgccgatgcatggtcgccgctcctgtcccgccattgcacaaggatcggggcatcggcggccgcgccggtcaggaccgcatgcttgagttcgcgcagccaggcgccggtggtcaggcccgatgcagccaggcgctccttgttgacgccgagccgggccttttcctccaccaggtaggccaggcatggaatcccgtgatcgacaaagcaggcgcgcacccggaacgtcgcttcgtcatgcacgatatcgccggccctctcgacacacgcttcggcctccctggcaaagccgtgccggctggaaaagcaggcgtgccgcatctgcccgtcgagtccaagttcggccacttcgatgaccagctcggtggcgtagcgatgcaccacgttccaggtataggcaagcagcttgtgctcgacctgtgccaggaatcctggcccgccgaccagcacgaggcgcggcttgcgcccgagcagcacacgcagcagcttgtcgaagccagagaaatgatccatgtgcgcatgcgtgacaaatacatgcgacaggcgcatcagctcgcgcggcatcagccgggcgatgtcgcccaggtcgaacagcagcgcgcgccgttcgtccaggaagtctacgaacagccccggatcgccaaaggcatcgttgacgaggcgggcttccagcagggggcgcatgttcactcgcggtgcgaccgacgctaaggctcaggcaagggcgcactggtccggctgccggtcaccgcccggtcagctggcgcagcagcttctgcacgatccgctcatgctgttccagcgccgcgtcaagtgtctgcgcgccaaaactttcattgtcctgctcggcctgcccggtcacgcgcgtgatgaacaagggggtgtccgtcggcgcggcctccgacacgccccggaagcgggtcgtcaccgtgccgccggactgctccagcagggtgcggcggaataccaggtcgttgtccgccatccagcgcgaccattcgtcgtggtcggctacctgcactggccggttcttctcatcaaggatatagaagcggcgccattgctgtggatcgtgacgaggcttcatcgactaccacctccgtggggttgtggcccgcttgtcacccgggcccgacggccaatgtgctttgcaagcgactaccgcgcaacgcaagtgcacgatctcaacgccgccctgcagctagtctatttgacggatgcgttcatgccagcgcgccgttgccgtcctcgacctggcatccggccggcgcctcaagcccggcgccgatgcgcgcgaactggccgtctgcgatcaggatatcgacctggttcccggctgcgagccggacattgcggaccaacagttgattcattgcatcttccgttatttcaggatgaagccgccttcaggacggcggggcttgtctctcggcacggttcaacgctgcggggcgcgcatgccgccgcgcggcaggcagccgagcagcctgtcgaaggccggcgcgatgtcctcctccggcacgcaggcataccccagcagcaggcctcgctgcacggcatcgccgatgaaatagcgcgacagcggccgcaccatgatgccgcgcgcgcgggcggcggcggtgatggccacgtcgtcggcatcgtcgggcaggcgcagcaccaggtgaaggccggcattgctgccgtgctcatgcagcgcgccggggccgagatagcgctcgatcaacgcggccaggatggcgcgccgtcgggcatacagcggccgcatgcggcggatgtgggcggcatagtcgccggcctgcatgaattcggcgacggttgcctgcgtcatcaggtggccggcccggtatagctcggcgtgcgcggtctggaaggcgccggccaggctgcgcggcaacaccaggtagcccatgcgcaagcccggatagagggtcttgctgaaggtgccgatatagatcaccggcgcatccggctccatgccctgcaacgacgggatcggctgcccggaaaaacggaactcgctgtcgtagtcgtcctccacgatccagctgccgcgctggcgggcgtactccagcagcgcgcgccggcgcttcaggctcatcacggcgccaagcgggtactggtgcgagggcgtgacgaagataaagcgcggcgcgggcatctccccgccggcctccgtgtcgggcagcgtcaggccctcgtcgtcgaccagcttcggcaccatgccgatatcgctgacctgcagcacgccgcggattccccaatagctgggttcctccacccacgcctggtcgccgggcgagcccagcatcctcaccaccaggtcgatggcctggtgtatgccctcggtgatcagcacctggtccggatcgcagcgcaccgagcgcgctacccgcagatgcgccgccagggcttcgcgcagcgccggcagcccgccgccatggctgtagctcagccactccgggtgcgggttgcgccacacgcgggccgagatctgtgcatagcggcgatgcgggaagcgcgtgacgtcgggaacgcccggcatgaatgcgccccattgcgtgggcgaggccgaggcattggccagcagccgctgtccgcgcggtgacagcccgggcatggcctgcggcccgacctcggtcgccggcaccgcggcggcgttcaggtagcgctccggcgcggtggcggcaacgaaggtgccgctgccggtgcgtgcatacaggtagccctcggccagcagctggtcgtaggcaaacatcaccgtattgcgagacagccccagttcggcggccaggtcgcgttgcggcggcaagcgggtggccggcgcaaggctgccgtcctgtatcgcgccgcggatgcattcgtagaggccgcggttgagcggtttgcccagtgccgccgtgccttcggggcccaggcgctggagcagctggtcgccgcagatcgatttcaaattggcaccatcggaattgcgaaagcggtactggattatagggccaaggccggttgaaatggctggcatcgctgggcccctgccagcggtgcccgtttcgcgagtcggccggtgccgacagtccttaccgcacaatgaccatgaaaaacctcgaactgaaccaacgccgtaccctcgcgacgccgcgcggcgtgggcgtgatgtgcgatttctacgccgaccgcgccgagaacgccacgctgtgggacgtggaaggccgtgcctacacggacttcgccgccggcatcgccgtgctcaacacgggccatcgccacccgcgcgtgatgcaggccatcgccgcgcagctggagcgtttcacgcataccgcctaccagatcgtgccctaccagggctatgtcacgctggccgagcgcatcaacgcgctggtgccgatccagggcctgaacaagacggccctgttcaccaccggcgcagaggccgtggagaatgccatcaagatcgcccgtgcgcataccggccgccccggcgtgatcgccttctcgggcgccttccatggacgcacgctgctgggcatggcgctgaccggcaaggtggcgccgtacaagatcgggtttggcccgttcccctccgacatctaccacgctccgttccccagcgcgctgcatggcgtcagcactgagcgggcgctgcaggcgcttgaaggcctgttcaagaccgatatcgatccggcccgcgtggccgcgatcatcgttgagccggtgcagggcgaaggcggcttccaggcggcgccggccgatttcatgcgggggctgcgggccgtatgcgatcagcacggcatcgtgctgatcgccgatgaagtgcagaccggctttggccgtaccggcaagatgttcgcgatgtcgcaccatgacgtggagccggacctgatcaccatggccaagagcctggccggcggcatgccgctgtcggcggtcagcggccgggccgcgatcatggatgcaccgctgcccggcggcctcggcggcacctatgccggtaatccgctggcggtggcggcggcgcacgcggtcatcgacgtcatcgaggaagaaaagctgtgcgagcgctctgccagcctgggccagcagttgcgcgagcacctgctggcgcagcgcaagcactgccccgcaatggccgaggtgcgcgggctgggttcgatggttgccgccgaattctgcgatcccgccacaggccagcccagcgccgagcatgccaagcgcgtgcagacgcgtgcgctggaagccggactggtgctgctgacctgcggcacctacggcaatgtcatccgcttcctttatccgctcaccatcccgcaggcgcagttcgacgcggcgctggcggtgctgacccaggcgctggccgaataaggggaacacatggaactccaacataccgcgctgttgcgcagccattgcctgatcgacggggaatggaccggggcgcaaagcggcgcagagctcgccgtctgcaacccggcaaccggtgaacggatcggctcggtgcccctggccggcgcggctgaagccgaacaggcggtgcgcgccgccgagcgcgcgctgccggcgtggcgcgcacagacgggcaaggcgcgtgccgccgtgctgcgccgctgggccgatctgatgctggcgcaccaggaagacctggcccggctgatgaccgcagagcaaggcaagcccctgcccgaggcgcgtggcgaggtggcctatgccgcgagctttctcgagtggtttggcgaggaagccaagcgggtcgatggcgaggtgctggccagcccgcgcagcagccagaagatgctggtgctgcgcgaaccggtgggcgtgtgcgcggccattacgccgtggaacttccccgcggcgatgatcacgcgcaaggtcggcccggcgctcgccgccggctgcaccatcatcgtcaagccggccgaacagacgccgctcacggcgctggcgctggcagtgctgggcgaacaggccggcgtgccgcgtggcgtgctgcaggtggtgaccggcgacgccgtgcagatcggcggcgtgctgtgcgccagcccggtggtgcgcaagctcagctttaccggctcgaccgcgatcggcaagctgctgatggcgcagtgcgcaggcaccgtgaagaagctctcgctggaactgggtggcaatgcgccgctgatcatcttcgatgacgcggacctggatcgcgcggtcgagggcatccttgcctccaagttccgcaacagcggccagacctgtgtctgcgccaaccgcatctatgtgcacgaccgcgtctacgacgaggtcgcgcgccggctggtcagcgcggtcgagcagttgcggccgggccatggcgtcgacagcggggtcacgcaaggcccgctcatcgacgccgacgcggtggccaaggtcgaagcgcatatcgccgacgcgctcgcgcaaggcgccacggtgctgacgggcggccagcgccatgcgctgggcggcaccttcttcgcgcccacggtgctggccaatgcgactgcgtcgatgcgggtcgcgcgcgaggagaccttcggcccgctggcaccgctgttccgcttcaccagcgaagcagaagtggtggcgatggccaacgataccgaatccgggttggccgcttacttcttctcgcgcgacatggcgaagatctggcgcgtggcgcaggggctcgagtacggcatggtcggcatcaataccgggctgatctccaatgaggtggcgccgttcggcggcgtcaagcaatcggggctgggccgggaaggctcacgccatggcatcgacgagtatctggagacgaagtacctctgcatggaagtcgaataacaacaatggggtgaggaacaccccaccaccagggcggggcacggcgcacccacgcagtgcgctggccccacggagacaagacagtccggcgaatgccggtgccaggtgggcgactccggtgcaagacctgcgcaaacttccaggaaacggaagggggcggacaggacgcgcgccgcgatcggcccaacgccaatggcacgcatattgcggactgggaagtgccatccgttgctgtcagcggatgccatttcttctatcgatgagggtacaaagatgcgttccactgctatccgcagcctgcttgcagtcgccatgctggcggcctcttcactggcacttgcgcaaggcgcccgcgactggcccagccagccggtgcgtattgtcgtgccgttccaggccggctcggccacagacctgatctcgcggcagatcggccttggcctcggcaaggaatacggccagaccttcgtggttgaaaaccgcccgggcgccgccgcgatgatcggcagcgaggcggccgcgcgcgcgccggccgatggctatacgctgctgatgtccgggccggcgtcgatggtgaccaaccggttcctgtacaagaagctcagctatgacccggatgcgttcgagaaggtggcagtggtcgcggtcacgccgaatatcctgttgtccaacccctcgctgccgttcaagacgctgcccgagatggtcgcgtatgccaaggccaatccgggcaagctgacctatgcctcgttcggtgccggcaccacctcgcatatcgccggcgagatgctgaaggccgcggccggcatcgatatcgtccatgtgccgtacaagggcgccggcgaagcgatcccggcgctgctgtcgggccaggtgtcgatgtatttcgacaccatcatgaccggcctgccgtatgtgaaggccggcaagctgcgcgcgctcggcatgtccaccgcaaagcgctcgcccaacgcgccggagattccgacgattgccgagcagggttatgccggcttcgatatcgcgccgtggtacggcattgtcgcgcccaagggcacgccggccgacgtggtcagcaagctcaatgtctcgatcaacaagctgctcaaggcgccggagttccgtgaacgcctggctgccaccggcgccgagccgcgcggcggcagcgtcggcgatttcagcgcgatggtcagcgcggagatcccgcgcaccgaaaagctggtcaagcagtccggcgtgaccctgcaataagccgcgtgcagcaaccctggggcgccgcccgcgcgcccctttacctgttctgaatggagttcccgatgttgcctttcgactggacctttccctacccgtcgcaaaagatgccgctgctggccgccaacgcggtcagcaccagccagcccctcgccgcgcaggcggggctgcgcatgctgtacgaaggcggcaatgccatcgacagcgccattgccagtgcgattgcgctgaccgtggtggagccggtgatgaacggcattggcggggacatgttcgcgctggtctggcacgaggggcagctgtacgggctcaactccagcggccgggcgccggcgcgttggaccctggatcatttcgccgggcacgacagcatgccccaggtgggctgggatacggtcaccgtgccgggccaggtcgcgggctggaaggcgctgtcggtccgcttcggcaagctgccgttcgcgcggctgttcgcgccggccatcgagtacgctgaacagggcttcctggtgtcgccgcagatcgcacggcaatgggccgcacaggtgccggtgctggccggccagcctggctttgccaaggcgttcctgcgcgacggcagggcaccgcaggcgggcgagcgctggcgcttcccggagcaggccgccacgctgcagcgcattgccgagagcgatggcgagagcttctacacgggtgaactcgccgcgcgcatcgtcgcgttcgccgaggaaaccggaggcgccatccgtgccgacgacctggccgcacatcgcgccgcctgggtccagccaatggcgcagcagttccgcggctacacgctccatgaaattcccccgaacggccagggcatcgccgcgctgatcggccttggcatcctggaccgcttcgacgtggaaggcatgggctgcgacagcgccggcttctatcacgtcagcatcgaggcgatgaagctggccttcgccgacctgcaccgccacgtgtcggacccgtccaccatgcagcacgcgcccgccgccttcctggatccggcctatcttgccgagcgcgcggcgctgatcgacatgaaacgcgccggcacacctaccgctggcatcccgaagagcggcggcaccgtctacctgtccagcgcggatgcggcgggttcgatggtgtcgtatatccagtccaactaccgcggcttcggctccggcgtggtggtgcctggcaccggcatcgcgctgcataaccgcggcgcgggcttcaacctcaagcccggccacgccaactgcgtggcgccgggcaagcagccgatgcacaccatcatcccgggcttcgtcacccgcaatggcgagccggtgatgtcattcggcgtgatgggtggctcgatgcaggcacagggccacgtccagatgatggcgcggcttgccgccttcggccagaatccgcaggccatgagcgatgccccgcgcttccgcgttgagcacgggccggtggtcaatgtcgaggcgcatctgccgccggatgtggtcgccacgctgcgcggcatgggccatcgcgttgaagtggcgccgcgcgacagcctggagttcggctcggcgcagctcatctacaaggcgccggacggctacatcgcggcctcggactcgcggcgcgacgggcaggcagtggggttttaggggcgagccgcccgcggtcacagcggcgccggctgaggctggctggcaggcgtggccgcggcgggcttcttgttgtcagtgccgctatatgagaagtacttcgccttcgcgcccctggcccagtacgccaccgtgaagtgcttgctgtcgcgcccatagagcaactccaggctgccattggcggcggaccactcggcatagccattctccgccgcgccttcggtcttgcgcagggacgcatagcgctcgtcgagcttcttgcgcacctcatccagcgccgggcgctcgaacgtcatcgtgatcagcgccacggtgtcctgcgcatcgcagttcaggatcacgcgcgtcaggccctgcaggtggaagcgctccaggtgcctgagctcgacggcgtcgccaccggcccactcggacttgccggtcctggcgtgattctgcggcggcgccaggcgagagcacctggccttgcccagctccagtcccagcggcgcagcggtgttgccggctgcgtcaggctgggcagggggcgcggcatggatcgaaacggatgtcagcagggtggcgcagagcagggcggcctgctgcaggttcaggcgggaaagtgctttcacggtcttgagggaagttgtcagccgggattctacggctttcttgtttcctgccatgcatcttcacgtctgcccgtggtccttgcgtacccggtctgcttgtcatatagtcctattaatagaactatagaaacaaggcaggagcaaagatggagacaccgactggagcactcgctggcgtcaaggtcgtggacatcacggcggtgttcatgggcccctcggccactcagatgctcggcgacctcggcgcggatgtgatcaaggtggagccgcccgcgggcgatagcacccgtggcatcgggccctgcggcaatgagaagatggggccgcttttcctcgggctgaaccgcaacaagcgcagcatcgtgctggacctgaagtcgccgcaggggcgcgaggcgctgctgcgcctggtggcggatgcggacgtgctggcgtacaacgtccggccccaggcgatgcaacggctcgggctggactacgagacgctggcgcagatcaatccgcgcctggtctatgtcggcatgttcggcttctcgcagcgcggacgctatgccccgcaagcggcgttcgacgacctgatccaggccgccaccgggctgccccaggcggttgccatgggcaccggcgacattccgcgctatcttccgctgaccattgccgaccgttccgtcggactctatgccttcggcgtgatctgcgccgcgctctacgcgcgggcgacctccggccgcggccagcgcgtcgatgtgccgatgttcgaaaccatggtgccttacgtgatgggcgaccatctctatggcgagaccttcgtgccagccaagggcggattcggttatccacgcctgctgtctcccgagcgccggccttaccggacccgcgacggccatgtctgctgcctgatctatcacgaccatcactggcgtgccttcctgaaggtgatcggcaagcccggcctgtacgacaccgacccgcgcttcgccgacatcactacccggacggcgcacatcaccgagctctacggcatggtcagcgacgaactggccaggcggaccacggaggaatggcaagtgctgctgaaggaggcggatatcccggtgttcccgatgcacacctttgaatcgctgctcgatgatccgcacctgaatgacatcggcttcttcagcgaatccgaccacccggcggtgggccgcatccgcgaaatgtcggtgcccagcgaatggcacgggacgccgccatcgcagcgccgccatgccccggccctgggcgagcatagccgcgaagtgctgcgcgaggccggctacaacgaggccgacatcgacagcctgatggcatccggcgcatcgcgcgaaccgcgccaggcatcggtgcatacggctggcacggcaagcgaggcctgaacatgaatgaagaactcctgtgcgaagtccgcggcgcggtcctctggctgaccatcaatcggcccgagcgccgcaacgcgatcaatccggcggtactggacgggttgcacgcggggatcgaccgtgccaaccacgatgaggccatccgagccgtggtcatcaccggtgccggagaccaggccttttgcgcgggcgccgacctgcagagcggcaagtcctttgcgttcgactattcggagccgagccagcggcttgccgacctgctgcgctgcgcgcggcgctccaacgtgccgctgatcgcgcgcgtcaatggcgcctgcatggctggcggcatggggctgatggccatgtgcgacatggcggtggccagcgagcgggctgtgttcggcctgcccgaggtcaaggtgggggtgttcccggcgcaggtgctgagcgtgctgcagcatctggtgccgcggcgcgtgctcaatgagctgtgcctctgcggcgagccgctgaccgcgcaggaagcgctggcggcagggctggtcaaccacgtcagtacggacctggacggcaagcttgactggctgctgggccggctgctcgacaaggcgcccgctgcgatccggcgcgggctctataccctcaagcatatcgatgcgatgtccttcgagcagtcgatggcgttcacggaaagccagatcggcctgttcgccatgaccgaggatgcgcgcgagggccagctcgccttccgcgaaaagcgcaagccgaactggaccggcaagtaagagaaaggcaaggagacaggaccatgcatgacaagacagtgcgcatcggcggcgcttgcggattctggggcgacagcagcgtgggcgcgccgcaactggtgcgccatggcgggatcgactacctggtgttcgactaccttgcggagctgaccatgtccgtgctggccgcggctcgcctgcgcaagccggagcttggctacgccaccgacttcgtcacggtgacgatgaagaccttgttgcgggagatcgttgagtgcaacatccgcgtggtcagcaatgccggcggcatcaatccgcagggctgcgcgcaggcgctggcggcgatcgccgccgagcagggcattgcggtgcgcatcgccgtggtcgagggcgatgatgtcatgccgctggtggcatcgctgcgcgaggcaggcatcaccgacatgcagaagggcttgccgctgccggacaagctggtcagcgccaatgcctatctcggcgcgctgccggtctgcaaggcgctggaccagggcgcgcagatcgtcattaccggccgctgcgtggacagcgcggtgaccctgggcgtgctgatgcacgaattcggctggcaggcgcacgattatgaccggctggcgcagggcagcctggccggccacatcatcgagtgcggctgccaggcgacaggcgggctgcataccgactgggagcaggtgccggattggccgaacatcggctatccggtggtggagtgccgggcggacggcagcttcctggtgggcaagccacccgctaccggcggactggtcacaactgccacggtgggcgagcaggtgctgtacgagatcggcgacccttcggcctatctgttgccggacgtgacctgcgatttcacgcaggtggcgctgcgccaggccgggccggacctggtcgaggtgcgcggcgcccgtgggcgtgcgccgggcaactgctacaaggtcagtgccacctatatggaaggcttccgctgcaatgcccagctgaccatcgtcggcattgacgcggcggccaaggccgagcgcacggccgaggccatcctggcccgcacgcgcaggctcttcgcggaaaacggctggggcgactacacccgcacccgggtcgaagtgctgggagccgaatcctgcttcgggccgcacgctgcggcgcgccatacccgcgaggccatcatgcggcttgcggtcacgcatcccgagaaggcggcgcttgaactattcgcccgcgaaatcgcggcggccggcacgagctggtcgcccggcaccacgggatcgggcggcggacgcgccagcccgtcgccatcgatccggcaatacgccttcctgctggacaagggtgcgctgtcgccgacggtggtcatggatggcgtgtggactgccgtctccatcccggccgggcacgcagcgacggacgccgccgcccccgccgcggcgcaggctgccgccatccctgccggtggcgacagcattgaagtccccctggtccggcttgcctacgggcgcagcggcgacaagggcgatatctccaatatcggcctgattgcgcgccggccggaatacctcccgctgctgcgcgccgaggtcacggcggcgcgcgtggccgactggctgggccacctggtgctggggccggtctcgcgctatgacctgccgggcttcgacgcgatgaactttgtctgcgagtcggcgctcgatggcggcggcatggcatcgctgcgcaatgacccgctaggcaaggggatggcgcagatcctgctgacgatgccggtgcgcgtgccgcggagcctgctgtcatgacacgcgccagcgccaaggtcgcagccaatggcggcatcgcgctggccgacgataacgccggcggcgtgacccgctaccggcaactggcaagcgtgctgcgccacaagatcgtcgccggcgagtatccggtcgggttccagctgcccacggtcgagcacctggcgcaggcgtacggccttgccaaggtcaccgtgcggcaggcctttgccttgctgaccgaggaagggctgatcagcagccagcgcgggcgcggcacgcacgtcatcatggtgccgtccggcccgggcgaaggcatgcgctcggccatcaacgatgtctcggttggcgccagcggcctcgagatccgcatcctggaaaagcgcaagaacatggccctgccgcccggccttgccacctgcggcgcgccgatggaccgctacgtgatgctgcgcaagctgcacgtgcatgacgggatgccgttctgcctgatcgagctgtatgtggccgacgcggtgttcgccaggttcccgcgcggcgctgagaagcatcacaagattgcccacttgctgcgggagcagctgggcgaccggcttggcacgatgcgccagaccatgaccgttgagccggccgacgccatgctggcgcgcgacctggactatgccttcgcggcaccggtcgcgcgcattgtccgtaccacgctggatatcgacggcaacgtgctcacggcgggccgcttctggtaccgcggcgaccgcttcatcctcgacgtggagatgcccgcgcagcttaccgagcgctaccccgaactggccgtgccgaaagctgctgcccggcaagacgactaaccaggagacaacgcatgacatcgcaattcgtacgacgcgccgccgatgtgcccgcctattccccggccaaccataccggaaccgccaaccagcgcgtgatcggcagggagacggtcggcgcgcggcgcatcgaagtgctgttgggcacgatttctcgcggccatggcgccttgccccatgcgcatccgaacctggagcaggcgtcctacctgctggcgggcgagggcatcggcgaggtcgccggcagggcgcgcaccctgcgtgcgggcgactggggtttcaatccgatgggcgtattccaccgcttcgaggtcgtcagcgacgagccggtgcaggtcatggtggtgtacgccccaccgtacagcgaaaacccgaacgcggccgtggtggccagcgcagcggatgatccccgcagcagcgcgcaggcggacagcctgcgcgaggtgccgatgcatgaggcggcccaaagcctgcctcactaccatcgcgtccgtgccagacccgtgattacgcgcgacacggtcggcgctcggcatctggatattcgcgcactggagctcgaagccacgggcggtgccgaagcgcactcggtggcggcgactgagcaggtgctgttcctgcagtcgggttcggtcagcggcgagatcaacgaccagcagttcaccgcgacgtcgggggactgggtctttgtgccggagggcggcactttcagctttgcggcgcaaggtggcccgtgcgaggccatcctggtgcgggcgcacgacgcggtgccctgaatccggcccgcgcagggcccagacaatgaacagatgccaaaggcacgaggagacagaccatgattcatccatgcatgcgtaaagtggccatcgggctgctgttgccgctggccgcggccacagccgcgatggcgcaggccgcggacgccagccaatatccggacaagccagtccgcgtcatcgtgccgtttcccgcgggcagcggcaccgacagcagtgcgcgctttgtcgccgagcggatcaccgcgcagacgggcaagcccgtggtggtggacaaccgtccgggcgccaacggcttcattgccgccaaggccgtggccggcgcaaccggcgacggctacaccatgctggtgacgaccaacaccacgcatgctgccaatgcgtccttgttcaagaagcttccttatgacccgatcaaggatttcgccccggcatcgctgatcgccaagagcgggctggtattggtggtgccgcccgacagtccggtacgcacgctggcagacctgacggcgctggccaaggcaagaaatgggacgctgacgtttgccagcggcagttcgtcgacccgcatcgccagcgaactctacaagatgctggccggcgtgcaggcgctgcatgtgccctacaaaggggtgccgctggccctgaccgacctgatggggcaccagatcgatttcatgatctccgatatttctccggccatgacgctgatccagggcggcaagctgcgcgcggtcgcggtgaccactgcgcagcgcaatccggtactcaaggatgtccccacgatggctgagagcggcctgcccggctatgagatggtggcatggtcggcggccttcttcccggccgggacgccgaagcccgtggtggaccgcatgagcgaactgatgcggaacggcctgaccgggccggctgccaccgactactttgcccgcaccggaggtcagcctgcgccatcgacgtccgaggaactggccgcctttgtccgcagcgagaccctgaaatgggccaaggtgatcaaggcagcgggaatcgagcccgagtgacgtaggggggggcgttgatgcgcagaacgcctcctgcaggcctgcccctacacctcaggtgcttgcgccggcatgaagcgccgggtagcggcccagaacaccagtgccagcaagctgaccacggcgcccagcgcgcacacgccccgccagccggcagcatcatagaccgccgtggtggcaatcgcgcccagcccgctgcccgccgcgtagaacagcatgtacgcgccgaccagccggctgtgcgccgcggcatcggtgcggaagatcatgctctggttggtgacgtggatggcctggccgcccaggtcgagcagcacgatgccgatggccagcggccacagcgaggtctccagccatgacagcggcagccaggccgccaccagcagcaccagtgccgcgagcgtggtgcgctgcccgaagccctggtccgcccagcgccccgcacgcgcagccgccagggcgcccaccgcgccaaccagcccgaaggcgccgatggccgtatgcgagagcccatagggcggagcgctcagcggcaatatcagcgcgctccacaagatgttgaacgccgcgaacatcagcagcgcgatcgtgccccggatctgcaagacccggttgcggcgcagcagcaggaacatcgatgcgaccaggctggcgtatcgcatgcgctggccggcgctggccaccactggcagcgtgcgccatagcagccatgcaagcaccagcatcgccgctgcggcgcagacatagacgttgcgccacccggccacgtcgctgacgccgccggccacgacacgcgccagcagcagtccgataaagacaccgctctgcgcggtgccgaccacgtgcccgcgctcatgcggtcctgcagccgcggccgcataggcgaccaatccctgggtcatggcggtgccgagcaagccggtcaggagcatccccgccagcagcaccgtaacggacggcgccagcgccacggcagccagcgcgccggccagggcaagcacctgtgccagcatcaggcggcggcgttgcaccaggtcgcccagcggcaccagcaacagcagcgccagggcacagccaagctgggtggcggtgaccacgccgccgatggccccggcgctgatggagaaatccgccatcagcgcatccagcagcggctgggcgtaatagacattggcgacgctcaggccgctggcgcaggcgaacagcagcaccgcgccgcgcggcaggttcgcacacggtgtcgcagggcaagtcggaggcggtgccgtcaccggcgtagcgggggaggttttcataccagtccaagtggttgcaaaacaaaaccagttgaagcgtaagcgtactggttttaaaatgcaactacattgacgggctgcacagccccaaggcaaccaagacatggccacccgcaaagacccgagcgatgaaacctgccccgttgctcgtaccctggaactggtcggcgagcgctggtcgctgatgatcgtgcgtgatgccttcgacggcatgcgccgcttcagcgacttccagcgcagcctggcggtcgcgcgcaacatcctgtccgaccgcctgcgccggctggtggaagccggcatcctgacgacgcagccggcttccgatggcagcgcgtatcacgagtatgtgctgacgaagaagggagagagcctgttccccatcgtattggccttgcgccaatggggcgaacaacatctgtttgcgcgcggcgagcggcgctcgctgatggtggagaagcggaccgggaagccggtgccgctgatgataccccggaccagcgacggtgatgtgctgttgcccggggaaacggaagtgcgcaagccgcgctaggagggggcggcggcgaggtcgtcaacagtcgccgcgctttgcagcgcgggcgacctgctgctgccttcagctgccccgatacgtcccgaagctccacggcgagcacagcaacggcacatggtagtgctgcgcggcgtccgcgatggtaaagcgcaccggcacgatgtcggcgaacacgtcgggggtgcggaagtagtccgctacccagaagcgcaattcgaactcgccggtgcgcgcctgcgccggcggcagcatcggcgtgtcggtgcggccgtcgtggttggtgcgggtgcgcgcgatcagccgcgggggctgggtggcaacgtcgaacagttccacctgcatgccggccacggggcggcccagggatacgtcgagcacatgtgtgctgatgcctgccatgatgcgttggtctccgggttgggccgcggcgtcagctgccgcggtagtagttgtagctccacggcccgaacagcacgggcaggtggatgcgctggctggcgtcggtgacgcgcaggcgcagcgggatcttcgacaggaacgacggttgcggcaggctggccttgcgcgcggcaaagtactcgtccgcgtgcaggaccagctcataggtgccggtgcggtagctgtcgccgatcagcagcggcggttcgctgcggccgttggcggccagcgtgacggtctgcagcggcgtgcgctggccattgtcgatgcggaacatctccacgcgcatgccggccgcgggcgtgccgttataggtgtccagcgcgtgcagcgtcaggcgcgggctcaggccgccttgctgcaccggtgcagcggtctggttgggggccgccgcatcgggcgttgcgccccagctggcgccagccagcagcgcgccgccgcccagcgtcatcgattgcagcgcgaagcgccggcgggtgggatcgaagctatggttgtccatgtcaggccccttgcttgccgtgcttgcccagcttgcggatgccgaccagcaccagcaccgcggccagcacctcgatcaccgccaccaggtacaggccggaggtgagcttgccggtggtgttcttgatcagccccatcacataaggcgcgccaaagccggccaggttggccaccgagttgatcagggccacgcccaccgcggcggcgctgcccgccaggtagcggttgggcagctgccagaacacggggatggcgctcatggtgccgaccagcgcggcagtcatggcgagcagtgcgatcaccggcgacagcacctgcgcgcccagcagcacggccagcaccgccatggcaccgccaccgaccagcgccgagccgctgaagtgccagcgcacttcattgcggcggtcggaatgcgcgccgttgaggatcatgccggcggcgccgcacaggtaggccacggccgcgatccagcccaccgccattggcgtggtgaagcccacgtccttgatgacggtcgggatccagaaggtcagcgtcgagttggcgcacagcaggcagaagtagatcgcgatcagcagccacaccttggggttggtgaagagcgtgcgccagtcgtggccgcgctcgcccagggcggcgttgtcgcgcttgagggcgtcctgcagcacgcgcttgtcgtcgtcggagagccagcgcgcctgctccggcttgtcggtcatgtagaaccaggcaaagatgccggccagcactgacgggatgccttccaggatgaacagccactgccagccgtgcatgccgctcacgccagccatgccggtcatgatccagccggccagcggcccgcccagcacgccggcgatggccgacgcggacatgaaggtgccgaaggcgcgcgcgcggcgctgcgacggataccagtaggtcaggtacaggatcacgcccgggtagaagccggcttcgaacgcgcccagcaggaagcgcaggatatagaactgcgtgggcgtggtgacaaagctctgcagcatgcagatcacgccccagcagatggtgatgcgcatgatcgtcttcttggcgccgatcttctgcagcagcatgttcgacggcacctcgaagaagaagtagccaaggaagaagatgcccgcgcccagcccgtacacggcctcgctgaactgcagcgcgtccagcatctgcagcttggcgaagccgatgttgacccggtccagccaggccagtacccacagcaccccaaggaagggcagcaggcgccaggttaccttgcggtagacgctgtcctcggcgtcgtcggcggtgccggcgaataccgggatgccttgtttcgtgatcgacatgatgtctcctgtcttgtcgtgttctgccaggtcttgcttggcggcggtgcatgccgtccgccgggttgggagcaagtatatgaatggcccgccaatgcgaaacgagggggctggtataggccccatagcagcaccgatatgggctgcaatcccttgtgtggcgcgggtttgcgggtgctccggccggggccgggcggacctatggattaccctaggcgggccgttttccggggtgcgcgcacgcgcatcgggcaggctcgtgcgggttgtaccggttgccgtgcggtgcgcgacacgctacaaagtcgccattgcctggcatggcgttgccgcccggagcggcggcggccgcacccgccaggcctccacttttgctgccacggacccaacatgattcgcgccgacgacccgttcgatacctacctgctgcgcgtgctgtgcatcctgatcgccgagcagagcgtgtcgcgcaccgcgatccgcctgaaccagtcgcagccggccatcagcgccgcgctcaagcgcctgcgcgcgatcttcaacgacccgctgctcacgcgcgagaagaacgtgatggtgccgaccgagcgcgcgctgcagctggcgcgcaatgcccaggccgcgctcagcgcgctggacaacctgctggtctcggacgagcgcttcgatcccgccaccaccgagcagagcttcgtggtggccatgcctgattacctggcgccgccgttcttcgcgcacgtggtgcgcgcggtgcggcgtgcggcgccgcacgcgcggctgtcggcgctgccgctgggggccaccttcgattacgagcaggcgctgtcggcgggtacggtcgacatcgtgatcggcaactggcccaacccgcctgagcacctgcatctgtcggtgctgctggaagacgaggtggtgtgcgtggtggcgcaggacagcgtgcatgcgcagcccggcaagtttacggcccaggcctacctgggcgcctcgcatatcgtgcccacgccatattcgcgcgaccagcgcggcctggtcgatgccggcctgagcaccatgcgcgtgcaccgggacaaccgcgtcagctgtccctacttcaacctggcgcccagcctgatcccgggcaccgacctgatcctgaccaccgcgcgccatttcgccaactaccatgcgcagcatgtgccgcttgcggtgctggagccgccgatcgagttcccgttcatgcgcttctaccagctgtggcacccgtcgcgccaccgctcggccgcgcacgtctggctgcgcggcatgctgaccgccgcctcgcaggagctgcgcgacctgcgcgatatgcgccgctagcggtatcggtttctgttatgggatctatagggcgcgggctctcgccgctgcggcgggccgttcctatactcggccccgtatccaatgattccccatgcgcgggatccctacgggagaagcatccatgtctcaaccactcgacctggcgtcggtcaacgccctggacgaagcggcctttgccgatgccttcggcagcgtgttcgaacactttccgcaggctgccgagggcgcctgggcgcagcggccgttcgcatcggcaacggcgctgcatggcgccatgatggacgtggtgcgcaagcttgacgaaccgcgccagcgcgatttcctgaacctgcacccgcagctgtcggcacgcaatatccgcgcgggcacgatgaccgccgattccaacgccgagcagaagagcgccggcctggacgcgatgtcggcgcagcaagaggccgcgctggaccagcttaacgcggactaccaggcgcgccatggcttcccgttcatcatctgcgtgcgccactacacccgcgaaggcatcttcgccgcgttcgaacgccggcttggccgcagcacgcagcaggagcttgatgaagcgctggcacagatcgccgcgatcacgcgagggcggctggcggcgcggctggccggttgagtccagcgcctatccaaaggcctcaagcgccagcgccagcatccccaccaggatgaggctggcggcccagaccgcctccaggttgaaccagctccgcgatacgaacttcagtcccaggtagcggtagaccagccacgccatggcgccgcccacggcgaacatggccagggtgtggatgacggaaaccagcagcgccatgcccaggttggcgctggcgagcgtggcggcggcctggtgccccaggtccgtctcggcacggcagaggccaagatagatcggcaccagcatcaggccggcgccatgcgcgatcgccaccgcgaacgaccatagcgccagccgcgatggcgcgatgcgcaccagtgcgcgcgggtggcctcgcctgagcagcagcacgatgccgcagccgatcagcagcacgctggcgccgatgcggatctgcgcttgccaggcgaccagggccgccagcatgccgaaaggcagcgtcaccgccaataccgcaagcgcatgcccgaaagccaggtacccgagcgcggcaaggagggcgcggctgctatgcgccagcaagccgttcgataccgccagcggccagcccatggccgggttgatgccgtgatagaggccgctggccagcactgccgaccagagaccgatctgttcccaggcgtgaccggtcaagccttgaccgagggatagcaaaacgagtcggtcgagcagtcgccgccttccagccggatctggtgcgcgcggtagccttccggaaactcgacccagtagtcatcggccagcgtcagcccgccgtccgggccggcatgcgccatgacttgcgtgccggggatgccgtctgggtagaactggttgtcccaggtggagtagagcgagttggtccagtagacgcgcttgccgtcgcggctgatctcgaccatctgcgggccgccggcgaatggcttgccgttgggatgcggcgtgcgccggacgatgccgccgatatggaccgacccagaaagcctgggcttgcgcggatcggtcacgtcgtactgccgcatttcgccggtgccccagcaggacacgtagaggaacttgtcgtcgagggacagatcgatatcggtcaccagcggcggcacggcaccgaagccctgcagcagcggcggcagcaggcttgcatcggcggcttcgggggggatggttgcggtcttctcggcgtggaacttgccgtcttcgcgccaccaggtccagatcgagccctccaggttggtggtatcgaccaccacgccaacaaagccgtattcccggatcggatcatgcgcaggcctgacttccagcgccatctggtggttggcgcccaggtcgatggtctgcacgttgcggcgcgcccgcaggtcccagaaatgcagcttgtgcccgtagcggttgcccagcaggtcctcgggcaccagaccgttctcgaactgcggcggcagggcccattcgctcgacaccatgtagtcgcgcggcaggttccaccagaagtcgtagtgcttctcctgttcgccgcggtcgatttcccagcggccgagcacgtcgaaggtctcgcagtccatgatgaagatgccgggcgcgccgtccgtgccatccgggccaccgcccccgagcgtgctgacgtagatgccctccggcccgcagtgcacggtatggggcctggagtagccggtcttgcggaagatctcgtccggctcaacgatcttgtggatccgtgcctgggtcgggtgcggcttggtgtcgatgatatacaggcgcgaagagcgcatgcccggaatgatcaggtagcgccgttcgagaaacgcgtggccggtcagcggcgacaacgacgacgagcacgcattccagccgaaatggtgcaactcgtcgcccttgttggtcatcggcacggtatgcaccacctggctgtaggtgggcgagccgggtttggcgtcgatcaccgcgagcgcgtctggctgcgaggcgtcggggcttagcagcaccgtataagcaaatgattccgctggtgcgctgatcgcgagttccggcgaggcgtgaaatgtcggatctggccgcatgttcatggggagccctcctggttttgcaggacgtcgcaacgtcgccggtacatcacttgcccttggcgcgtggccaaggtgcagggtaagcctacttagcctaggtcgttctcaataccgagtcaaaggcggcgcaggcgcggcaagtgaataacccccaggggggggcttattcatgctggcaaaagattcgcttcgtgaaatagagatttacgaaaagccataaatcaagcagaaacggggttccgggccagcgcgcgcaacgcgcgccacaccggtatcagcgaaacgatcagcgaaatggaaacccaagcaatggatgcggtgaaacctcaaggtgagggcgatgatgagttctgcctggacaatccggcactggagagcatcggtgtcaggatcacccggtggcgcgacgactatgtggaacttgagctcccgctcgcgcccaatatgctcaaccgcagccgggtggtgcatggcggcaccatctgcaccttgctcgacgccgccactggctattcgggcctttactcggcgccgggcgaggccgcgcgccatgcggtcacgctgtcgctgacctcgaacttcctgagcaacggcacgggcaagctgctgaccgcaaagggcatggtcgaccggcgcgggcgctcgatcttcttctcgcgcgcagaggtgtggctggatggggagctgctggtggcaaccggcgtcgccacgatgaagtacctgaagtaggcagcccgtctcaggcgccgtcctggcgccagcgtgtcggcgacttgccgaactgtgccgcgaaccagcgcgagaatgcgctgggttccgagaaccccagcagcgtggcgacccgggccagcggccgctgcggatcctgcaggtagcgttgcgcaagctcgcggcgcacctcattgaccagtgcggagaaggtgtctccatcctgctccagctggcgctgcagcgtgcgcggactgatgccaaggctttgcgcgacctgttccaccgcgccgcgcccgcgcggcaacagctggtgcagggtgcgccggacctcggcagcgatcgaaggcttgccggcccccgcctgcaggtcgaggaagcccctggcatacccggccaggctggcatcggccagcgggttgatgcgatccaggtcgccgctggcgagcaccagcccgtcgaactccgaaccgaactcaatgtgttgcccgaacaggcgcctgtggatttgcaggtcggcaggcgccgcatgggcgaagtgcacgctgtgcggcttccaggacgcgcccaggatggcgcggatcaggctgtacaaggcggcaacggtcagttccatggcctgcctgccgggctggtgccggccggtctgcaacgtcacatgcagcaccgtgatctcggggtactccgtgaccaggatggagatggagtcgctgagccagtggcggtagcgctcgatctccgccagcgcgtggcgcagcgtgggctggtgctgcagcagcaggctgaccgggccgaagtctgacaggcgccacgattcccccaccatcaggccaagcgaatggcaggcggtgacccgggccgaggcctccagcacttcggccaggcgcgcttccgggatgcgcaggtccggggtgtacaggcaggcctggtccaggccggcctgggccaccatgcgcaccggatccaggcccgcgccccgggcaatctccaggtatttggtcagggaagcgctgcgaacaaggacggtcataaggctgccgcgagagtgggtgggggcgtcggtcgtgtccgtcatcaaatgtcaaatcctggcgcgatcggtcaagggtgccgcgccatggctgtctgacaatcgttaccgtcgcgccaatgatagcggcgcgggcaggacacgacaatcaggagacagccttggcaaaagccattcgcatgtacgagaccggagggcccgaagtcctccgctatgaggacgccgaggtaggcgacccgggcccgggcgaggtacggatccgccacgccgccgtcgggctgaactatgccgacacctacttccgcaacggcacctacccggtgccgctgcccggcggcatgggcgtggaggcagccggcgtggtgcaggcggtggggccgggcgtgacccatgtcgcggagggcgatcgcgtcacatacaccggcttcatcaacaccctgggtgcgtacagcaccgagcgcctggtgcccgccgcaccgctgatccgcctgccggaagcgatcagcttcgagaccgcggcggcgatgaccatgcgcggcctgacctccgcctacctgatgcgccgcatctacccgttccagggtggcgaagccatcctgctgcacgcggctgccggcggcgtgggactgatcgtctcgcaatgggccaggctgctcggcctgaccgtgatcggcaccgtctcgaccgaggccaaggcagaggtggcgcgcgcccatggctgcgaccacatcatcaactacagccatgaggacgtggcaaagcgggtgcgggagctgaccgatggcgcgggcgtgtccgtggtcttcgacagcgtgggcaagagcaccttcatggcctcgctggactcgctgaagcggcgcgggttgatggtctgcgtcggcacggcctccggcaccatcccgccgtttgatccgcagctgctggcgaggaagggttcggtctacctgactcgtccggcgctggccgactacattgcggaccccgccgaaaaggccgaactggctgccgaggtgttcggccacgttgccgctggccgtatccgcatcgaaatcaaccagcgctatgcgctgcaggatgccgtgcaggcccaccgcgacctggaatcacgcaagaccaccgggtcttcgatctttgtgctgtaaaggagcgtccccatgcgagcccaaccgcttacctgcaatatcggcgccgaagtcagcggcgtcagcctggccgatgccgcgcgcgacgacgcgctgtttgccgagatcaagtccctgctgctcacgcacaaggtgctgttcctgcgcgaccaggaaatctcccgcgcggaccacgtggcgttcgcgcgccgcttcggcgaactggaagaccatcccgtcgccggcagcgatcccgatcatccagggctggtccagatctatcgcagcgacaagcgcgagaactacgagaacagctaccacaccgatggcagctggcgcgaaaccccgcccatgggctgcgtgctgcgctgcatcgaatgcccgccggtcggcggcgacaccatctgggtcaacatggcggcggcctacgagcacctgcccgaggaaatcaagcagcgcatcgccggcctgcgcgccaagcacagcatcgagcattcgttcggcgcggcgatgagcccggaaaagcgcgccagccttgccgcgcagtaccccatggtcgagcacccggtggtgcgcacgcatccggaaaccggcgagaaggcgctctacgtctgcggcttctccacgcatttcgccaacttccatacgcccgagaacgtgcgctacggacaggacaagaccccgggcgccagccatctgctgaactacctgatcagccaggcggcgattcccgaataccaggtgcgtttccgctggcagcccaacagtgtggccatctgggacaaccgctgcacccagcactacgcggtgcaggactactggccggcgccgcgcaagatggagcgcgccgccatcatcggcgacaagccgttctgaggcgcaccagccgccgccaggccacgtgcctttatcaatggagacatgccgtgcactacctcgatggatccctgttccctgaaaaccagcagccgctgatcatcaccgcggcaccgtatgcaccgggctggctgccctccgatttcccggaagacatccccgtgacgatggaagaccagatccagaaggccgtggattgctacaacgccggcgcgactgtgctgcacctgcatgtgcgcgaactcgacggcaagggctcgaagcgtctgtccaagttcaacgagctgatcgccggggtgcgcaaggcggtgccggagatggtcatccaggtgggcggttcgatcagcttcgcgccggaaaacgagggggatgccgccaagtggctttccgacgacacgcgccacatgcttgccgaactcgaccccgttccggaccaggtgaccgtcacggtgaacacgtcgcagatgaacgtgacggagcacgcggagctcgcggatttcaagggcacctcgcgcgagaaccccgcgatcttcaacgcgtacaaggagatgacggttcccgcccagcctggctgggtcgaagagcacatccgccgcctgtccgctgccggcatccagagcgcattccagtgctacaacatcaatagcttcgaatccgttgagcggctgatccggcgcggcgtgtacaagggcccgctggtcatgaactgggtggcgatcagcggcggcatggatgcgccgagcgtcttcaacctcgccaacatcgtccgcgccgtgccggatggcgcggtgctgaccgtcgaaagctccgtgcgcaacgtgctgcctgtgaacatgatggggattgccctgggcctgcatgtgcggtgcggaaccgaggactgcctgtggaaccagtcgcgcacggccaagatgagcacggtgaagcagatcgagcagctggtgcgcatcgcgggcgaattcggccgcaaggtggcaacggcccaggaagcgcgcgacatccagaagatcggcgtgttctacgacacggtcgaagagacgctggaggccaacggcttcgcgccgaaccgcaatggcggcaatcagggcttcctgcgcaaggccgcctgacccgggtcggtcggcactggcgatgcgccagcagaagggcaggggtggcagatcaccggctcacgatgaagccggctgctgccctgaacaaccctcgaacattcggagacaaccatgaatcaagcacaaccgtcggcgcgccgcagggcgtcgctgtcatgcatgctcggcctggcgctgtcggtggcgctgccggctgcgctcccatcgaccgcccaggctcaggcgtggccgaccaaggtggtcaggatcgtggtcggcggccccgccggcggcaccgccgatatcctcgggcgcctgctggccgaggggctgacgcagtcgctgggcaagccggtgatcgtcgagcagaagccgggcggcgccggcgcgatcgcggtcaacacactgctttccgcaccgcatgacggacatacgctgctgctgatccagggcggcatcgtttccgaaacgccgctggcgctgaaggtctcgttcgatcctttcaaggacctgaaacctgttgcccaggtggcccgtacggggctggtgctggtgggcaaccccaagctgccggcgaagaacttcagcgaactgcttgcctacatcaagagcaagcccgggcagatcgactatgcctcttatgccgccggcatgcgcggccagaccatcggcgtccagttcaaccgcctggccggcgtggatatgaagcatgtcggctacaagggatcgccgcccgcgctgcaggacgtgatgggcggccatgtgccgctgatgttcgacggcctggccacgtcgctgccgctgatcaagtccggcaagctcaaggcctatgccgtggcgtatcccaagcgcatccccgcgctgccggatgtgccgaccttcgccgaagtcggcttcccggcgatgacggagcccggctggatgggggtgtggctgccgccggacgtgccggcggcggtgcaggaaaagatccgcaacgccacgctggccatcgtgcagcagcccggctaccgcgagcgcgtggaggccatgggcatggacgccgggcagccgctcagcagcgaggccctgtccagggatgcgcgcgccgcccatgagcggcaggcggagttgctgcggtcgatacatttcgtgccggagtagggggcggcccgccttgcgcgggcctcggcgaatcgttcagcaaagttgtatgctttctgcatggcgcgccgggcgccttcagcgcgtcccggccacggcgcaaaaagtatggcggtgacaatatgaagcctgctcacgcattgattgtgacttgcgtcatgctggccgcctgcgtatcgacgggcgtcgaggtgaaacaggagcagatggcgaacttcctgctcggtttctccaccctcgacgacgttaccgcccagcttgggaagccctcgtcgcagaccaccctggtcaacgggtcgaccatcctgatctattcgtttgcggcctccaggccgcaccctgagagctttatcccgttcattggcccgctgttcgccggcggcgcgatccggtcgtcgacggttttcttcgagttcgacgagaacggcgtcctcaggagccagcgcctgacgacgtccggcagcgtttcgggatggagcgtgctgccgcccgatgcgttgccataggcgggggcggtatacttccggtcctttatggccctggccagacacctgagagtccccatgagcgctttgcctccctgcccaaaatgtcattccgaattcacctatgaagacggaggcctctacatctgcccggaatgcgcgcatgaatggtcggcgcaggcagcggcgccggccgaaccggaggccagggtttatcgcgatgcggcaggcaatgtcctgcaggacggggacaccgtcaccgtcatcaaggacctgaagctgaaggggtcggccggcgtggtcaagatgggtaccaaggtgaagaacatccgcctggtcgacggtgaccacgatatcgactgcaagatcgacggctttggtgccatgagcctgaaatccgagttcgtcaggaaggtgtaagcgggcgccggcgagccggtgcctgccttcagttgaacacgtcctgccgatagcgtcccgcgctgactaggtccgccagccagtccgaagccgcctctggcgtcatccccccttgctctgcgccgatctgaatcagcacctgcctgaccgcgggcgccatgtggcggccgtcgccgcacacgtagatgatcgcgccctggttcagccgggcccagacatcggcacggcgctgccacagcaggtcctgcacgtagcgcggctcgccatccacgactgaacaggccaggtggacctgcaccacgccctgtgcctgccagcgctccacgttgttgcggtagagccagtcgtgcgcggggtggcggcagccgtagtacagctgcaccggggccaccggctgcccggctgcctgttgcgcggcccgctcctcaagaaagccgcggaacggcgcaatgcccgtgccggggccgatcaggatcatgggcgtggccgggtccgccgcgggcgcgaaggtgggattgggggtgcggatggcacccgccaccatggcgcctggcgccaggccctgcagccaggtggaagccacgccgcggaagagtccgcggcccgatagcgccggtgaccagaccgtgccgacggtgatggtcgccacgccgggcgagaccagcggcgatgaggcgatcgaatagaacctcggccgcattggcacggtgcaagccagcaggccggccagatccacctcgatggcgggaaagcggtccagcacgtcggccagcccgagccggcgcggcgccacctgggcggcgtacccgctcccggcgtcgtccgaggccagctgccgcagggcctggcgcgtgaccgggcagcgcgaagactgcgacagcaggcgcagggtatggcgcgacaccacgtcctgcagctccacaaaatgggtcagcaactggcgcacggacagggcctcgcccagcggcaggccgcgcgcggccccgccggaggcggacaacgtgacgattgcgtccgggtcgatgccgatccgctcgcacagggccgcgaccatcccgggctggttctgcggatagacggcgaggtgatcgcctgtggcgtagcgcacgccgtcgggcagcctgaggcggatatcgcgcgtggaagtccgcggcgcctcgtgcgagaaatcccacaggccggacggatcgttcaccagctcggtgttggccaggaccgtgaaggcctcggtgtttgccggcagcgtggacgcgcggatctcggcgacgtctttcacctgcacccggaccggcggcgtcccgtgggccggcccgcccacgccgtcaccggcctgcaaggcttgccacagcaaggccagccaccgttccacggcctggtcgaagtcgccgttgccgtcggcttcgccacgcggcagcagcggactggcgccggcattggtgaagaattcatagacgcggcgcgggaaggcctggtacgtcggccattgcgagttgccgcagcccagcacggccacgctcagcgcttctgcccggtagccgctggcggcgccgctgtcgagcagcgcttcgagccgccttgccgagtccggcgcgcggccgttataggtggcggcgatgatgacggccaggccggtggtcgggagcgcgtcggccacgtcgtccaggtcgcgcagcgtcgcatcaaagcccgccgccagcgcgccggcatgcacctgctcagccagttcgcgcgcggtgccaaggctggatccgcacagcacggcaagtgtcctgccgcggccctgcacatcggggcccgcccgcggcgcttgcgcggtcccggcgagcggcgccgcagcgatgcgctcatgcggccggcgccggcgcgcacgcaccgtgaatccgtcgggcttgatcgtcagtgtttccttgatgcggaactggtagtcgtgcgcgtcggtgaactggaaattgcgcaacatcagcgccagtgccagcttggcctcggtcagcgcaaactggcggccgatgcaggcacgttccccgttgccgaaaggcatgtaggcgtggcgcggcagctttgcctcctgctcaggcaggaagcgatcgatgtcaaagcgttccgggtcggcccacaccttggggtcgcggtgcagcgcggtcagcaccaccgacaggcgcctgtccttgcggatcaggtagcggccgcccagcagcgtgtcttcaaacggcgccacggcgaaggcaggcgcggtgggccacaggcgcaacgtttccttcagcacgcggtccagtaccggcagccgcgccaggtcggcgtagaccggcgccgcgtcgccgggcagcacggcgtccacctccgcgtaggcctgtgccatcacgcccgggttgcgcagcagttcatacagcgcgaaggtgagcaggccgctggtggtctcgtggcccgcaatcaggaacgtgatcacctggttgcggatgttctcgtcgtccagccgctggtcggtgtccggatcccgcgcttccagcatcaggccgagcaggtcgttggccgtgccgcccgggcgttccgccgcgtcgcccgcgcgccgccgccggatcacgtcgtccacaaggtcgcgcatgaagcgggtgtcctggtcgaacttctggtgcgccgcatgcatgaagcggtcttgcagggcaaagcgcgtcagcttggacatcgcctcttccagcgcgcccaccatggcctcgatgaaggggtgcagttccgtgctggcgaacgattcaaagtcatagccgaagccggacagcgcgatggtatcgagcgtcagccgcgtcatgtcgtcagcgaccgcgatatcggcatccgggccttgctggtcccatttgtccaccagccggttggccacgcgcagcatgacgtcgaagtagcccttcatcgcgcgctggctgaacgccggcatcaggatgcggtgcgccttgccccagttggcctcgtcggagcgtgcggtgaacagcccgtcgccggccatgccgcgcaggtaggacaccggcgggccgatgtacttgcggaactgcgcggcatcgcacaactcggaggccagtgccaccgacgtcacgaacggcacgcgccggccggcgaaattcagttcgaagatgccatcatggtggcggctgcgcgccagcaggtgctggcccagcgcaccgggtgtgatctgcagcaggttgccgaccagcggccaacccgggtcgcgcgggatgggctcggggatgggggcatgcatggagcgggcaggggcttgatgcggcgcgtcggaggcctggtcggggctggatagctcaatgggcggcggcatggcggggcggtgtctcctgaacgggagctgacacgcgatttgccacgtgcggccgtttcatttaacgtagacatctgtctaccggcgcaagcgtagacaaccgtagacatgctgtcaacgaagcatgtcgggcaaaaaccgagtcctgctactaaaccgcattcatggaagccattgccgacggcaaacgccgcctgatcgacgccgcgttgcggctggccgcagccaagcgcagctttgcggcactcaagctgcgcgagatcgcgcgcgaggccggcctgaaccccaacacgttctaccggcatttcagcgacatggaagacctggccatcaccgccatggccgaggtaagcgccgaactgcggccgatgctgcgcgcggtccgatgggccgctgcccgcgacaacccgggtgaagtggccacgcgtgcgtgcgaagcgctgttcctgtacgcgcagcatcacccggatgcattcatcgttggtgtgtgcgggatcacgggcccgcagcccgcgcttcgcgttgccattcgcacggtgctggatgacatcgccgccgagatggcggaagacatcgagcggctggggctgtgtcccaagctctcacgcccggtcattgacgacgtctgcgcgtacgtcgtttcctaccttttccatcaatgcgtcgactacatcgaagccgatgccgccggacggcgcaggctgatggcgcgctcggtgcagttgagttgctggctgctgcagggcgcggcagggccgaatgcccagccgggagcgaaatcaggcagggagcgcaaggccgtggcggcgtagcctgttgcgacgaaacacgcagaaggaagaaactcagccgaagcagtggccgaagcgaaggcgtgtgtccgggccagcactcaccctgaaatcgtgatgccgcactcttgcgccaccgccaggagcttttccatgtccggcgcgcctggcggaatttcctcatcgagccgcgtgaacaggtgcgatgcgtttccgccgtggctggtgactgaaatcatttcgccgccgccgaagccgaaacggaagtaatgcaccgtgcccgctggcacatggacaaaggtgccagcggcagcagtgatcgcttgatcgccatagccgatctcgaccgtccccttggtaatgaagaacgattcgtcccagtcatggctatgcggcggtgggccactgccttcttcgccctgctgcagaaacacctcatagccttgcgtggcggtcttggatgccagcaccgtgatcctttctcccaccacgttgagcgcgcgtccatacgcttccggagtcaccgcaaatggttctggtttcatgattttctgctccgtcagtgagagcgccgacgtggcgatgctatccgggtgtgaggcatgcggcagctccaaagcgagccggccacgatgccggacgggcggggcatgggctgcccgcttatttgatgtgtgggaattttaggcggcccacgatcggaagtcatcgccaggaatgaggattgccacggccaatgtgcgtgagcaaacgttcctcccatgcgcaatgtcacttgcccctggctcgctttcccatttcaatggagttgacagggagaagggatgagatcatggcagtcactcgcttgcagagcattcccggcatcggggttgacaggatgaccgacaaggctggctcgatgcgtaacgccaacagccatctgcctttcatgggccagcccgcactgcgggaaaccgcagtcgaacgcgtccgacgcctctccggcgtcacatacggccctgataccgaatgcatcgccgagcgaattcgcctggccccgatacgtgcaacgctgagcgacgaaaatgccggccgcttctggtcatgatggttccgagggcagcgaccggaccctgctgtatttcggttggctgaccctgttcatcgctctggcaacgccggccggttacctggtcgatatacagacgtcgtacctgctcaagaaccagctgcatgcgacggcgacggagatctcgacattccggctggtgacgggcataccagtctaccttgcgttcgtttttggcctcgcgcgcgaccaatggaatccgctgggattgcgcgatcgtggcttcttcctgattttcgccccggcgaccgcggtggcattcatctggatggcgtattcaggtttctcatacgcggggctggtcatcgggatgctgctggcaatgctgtcgtcccggttcatcgccgcagcctatcaggggttgatcgccctggtgggccaggagaagctcatgtccgggcgcctgagcgccctgttgaacgtggtcggctccgtcccggtcgttgcgggagcgttcgcctccgggtacatctccgatcatctcgccgcaaaagaagccttcctgctgatggcgatgttcgcctttttgattgcggtgctggcgctctggaagcccgtttcggtcttcggccatatctacgagaagccgcaagccaggggcacggatctcgttggcaatgtcaggcggctggtgagacataaggctgtttatccagcggttctcatctgctttctgtggaactttgcgccaggagcggccacgccgctgcagttctacctgagcaatgagctgcatgcatcggattccgtttactcgtactacaacgggatctttgccgccgcgttcgtcccgacatttctgctgtatggctttctgtgcaagaaggtatcgctgaacaagctgctgtggtggggaacgatcgtcgcagtgccgcagatggttccgctggcattcatccactcagccaatcttgccctggtattggcggcaccgatagggctgatgggcggtgtcgccacggcagcatacttcgatctcgcgatgcggtcctgtccgccgggcctgcaaggaaccttgatgatgctggtggatggcgttctcgcgctctcggcgcgtgccggcgatctcctgggctcatggatctataacagcagcccaacgcacggtttcacatattgcgtgatcgcgactaccgtggtgtacgcactgatcctgcttttgatcccgctgacgccaaaggcattgattgctaccagggatggcgaaccaagtccggaggtccaagcctaggcgtcggcccgctgctgctccagcgtgcgcaatcgctggcgggcgaggagggggcaggccctagtaatgtatggtggccgggctctggatgccggcgttctcgtcaacgacatacgcttcgattcctgcgctgccgccattccaccagtttgtcatatcaaagacagtctcgtcgtccagccgctggacatggacaccgtagatggtcagcggcttgccgggcgcgcagaccgcgggcgaagtcagtggcctcaggaagtgaacagcgctgggcgatgtcgtggatatgttggtgacgcgctgtgcaacgaagcggcctgagatattctgaatctgcaacgctgtctcgacgtcaaggccaatccctcgggcggccgacgggttcgtcaggactccgccctcgcagcccgaaccggaccatggcgcaatgcttcttgacaggaacgtgaccagcctgcccatgcgatcgcgcgtgtcgaagtgaggatcgacgaacgtattgtccaatgccgtagtgttcaggaattcagggccggaaaaccctttcgggtcaaatgtcatgtacttgttgtatggatcgctcagcgcctgcgtcgatgtgaccgtcccttcgatggcggagaaaacgaactgccccaggacgttggccccggcgctggtgccgccaacaggaacgttctgctgcatgagcgcggcgatggtcgcgttgagcttcgtacctttccagaacttgatgtagttggcctgatcgccgcccgcaatccacaatgcgttcgcgctgccgacaacggcgtttacaaacggatcattcgccgcagctgtgtcggtaatgaccagcgtttccgccgcagtcaggccgaggtacgcgccaccgacatagccgtccactgcggggatatcggtcgcgttcttcttgttgctgtagtagaagtaagggtcgtaagcgtcggtgccggtcgcgcgaatcacgaccatgcgaccgcccgttgctttggtaatgcccgcctgccgaatcatccagcgaaacgcgccatcgacatcgggcccgccacccatgatgaccaccggctgtaccgcccgtggctgaggtgtggggagggcctgcaccggcactggattgccagtcatgaagtaccgtgtaccagttacgaagtagctgtaggtagtcttgtcacctgcaaacgcggggggcatcagcaccccaagtaccacgctgatacaggcgaccgcgtagtacgccaccaccctgcaatgctgtgtgagcttggaaatgaattccatgacgtgacacccccctgccgctatcttctttgtacaactcggtgatgacagaaaagcaacgcgccaaatccctggaagagctggcagatgtcacgtcgccaggcaaaagctcccggctgttattccgagcacaagtgcgggacgtgcaggcgttccgttatagacgctggcgcacaaaaactccagccgaccctggtcccgacaggagatgcggtgaggcagacacgaccaccagcaacaaggccgccatcgcggcctgcttccgaaggtcactacaggcggcgctctcgcatgccggatcgccatgagagcaaaggtgccacggccatcggcaaggtctgttcgctggcgtacgttggcgttgtactgtttgccagtccccgcctggaagcttgcgcaactggcctcgccaaggcgacggagcgctcagtcggcgcaccgttgaatgaactgcgtcatggcgggcaggatggattcccggaaacgctggccggcgaaggtgccgtagtgacccacgccgtcgacgaccaagtgttctttccggtcggcggcaagacctgcgcagagcgcgtgagccgcttcggtctggccgcggccggtgatgtcatcctcgctgccttcgatggtcagcaatgaaacgttggcaatggcctcggggtagacacggcgctggccgacttccatgcggccgcggcacaggtgatgctccaggaaaaccttctggatggtttccaggtagtactcggccggcacgtcgagcacggcgttgtactcgtcatagaacttgcggtgcctggctgcctcgctctgcctgccatcgaccaggtggcggtaaaagtcgaggtgcgcaccggcatggtgtgcgacgttcatcgatacaaagcctgccagctgcaggaagcccggataaacccggcgcccgtttcccgggtaaccggcgggcacccgttcgatgacgttcgcctcgaaccacgccagcgaatattgctgcgcgaactggtcgaccgccgtcgggctgacgcgggtgtcgatcggcgcggcgatcagggtcatggagcggggctgcacctgctcgttgtcttcggccatctgggcgaccgcgcaaagcaccgggaccccgggctggcaaaccgccacgatatgcgtgccggcgccgaggtatcgcaagaactttttcaggtaatcgacatagcagccaagatcgaagtgcccggcgtcaagcgggaccaggcgcgcatcggcccagtcggtgatgtagacatcatgcccgggcagcaatgcctcgaccgtcgggcgcagcagggtggcgtagtggccggagagcggcgccaccagcaacacccgggggccaggattggacatgtccttcctgaaatgcagcagccggcagaagggctcctcgatgagcgcggtctcggtgacggccacccgctggccgcgcacgaagacctcgtcgatctcaaagcttggtttgccataggccttggtcagccgggtgaacaactcaagcgcggcgtcggcctcgcgcagccccggaagccaggcgaccgactcgccccagaaattgactgcacgataacctgcctcgatcatcgccccgagcgggccaagggactgcagcgtgagttcccgcagagcatagagcgccattgcgattcccgcctttttgaattggttggtgtgttgttctggcgcaggggccggcaaaccgggtgctgcgcaatgcgggcttcagcgcagttggcgtgcccgacagccgcatggccggcttcgtgcaaggtgggcgggcgggcgacaggcttctgccgcgggtgcgtaggtgggaaggtggcgctggtgcactgagaagtgctgcgcgcggctcaggtgccgtcgatgtcgaatggactggctgcgggaggctccggtcttgccgtggcggccgttgcggccggactgatgcgcgcggcccaggtcgcacgcgaatcggctggaatgctgcatgatgcccccctactactcaagccaccagcattgcgtcgcaatgccagcggaacagcttgcaatcaagttacgccatttacattcagtaacatattcgatctaaccctattgcaaccctttgcatacgtccttggcaacgaaggaacctttgcgggatcattcgatgcgaatgtggccttatgtgcaggcgatatgtgatcctctattgccagcagggcggacgcagccgggccatctgctcggctatttgtaaatttttgcaagttgcgttcgggtaaaacgccaggcaggcggatgtggttgacccgcccggtcccgcttcctcgctgtcacgctgcccggccaatgaccggaatcacgccgaaggcaacggtagccagcatcatgaccactgccgccgacagcgcccagagcagcgtatagcgctggtgatcgccaaattcgacctcggccaggccgaccagcaggtaggtcgacgcgaccagggggctcagcaggtgaacctgctgcccgatcagcgaggcgcgtccgatctccgccgcgccgatgccatagacggcggcagccttggccaggatcggcaggatgccgaagtagaacgcgtcgttcgagataaagaacgtgaacggaatgctcagcaccccggtcaccagggccatgtagggacccatccagtccggcacggcgctgatgacgctgttggcgatggcgtcgaccatcttggtgcccgacaggattccgacgaagatgccggcggcgaaaatcagcgacaccaccggcacgacgttggcggcatgcgcgctcatgcgctccttctgttcgtgcaggctcgggtagttgaccatcagcgcgatggcggacgcgatgatgaacagcgcaggcagcggcaaggtgccgagaatcagcagcaccatcaggccgctggtcagcaggaagttgaaccacagcagcttgggcctggcgatccggggatcgctggttgcagccttcggcatggcatggccgtcatcgccggccccggtgcgcatcacggcgatgctgccaagccggttgcgttcgcggcggcccagcaggaatgccacgaacaggccccacatgccggtgacgatcatcggcaggatcatcggcacgaacagcgagcccacgtccacgcccagcgcgctggcggcacgcgcggtcgggccgccccagggcaggatgttcatcagcccgccggccatcatgatcacgcaggccagcaccagccggctgatgcccaggcgcttgtagagcgggagcatggcggcgcaggtgatcatgtaagtggtcgagccgtcgccgtcgagcgacaccagcgcggccagcacgaaggtgcccatgatgatcttgaccggatcgccgcccactatcttcaggatcgcgcgcaccaccggatcgaacagcccggcatcgatcatcaggccgaaatacaggatggcgaacatcagcatcacgccggtcggcgccagcttcttgacgccgtccagcatcatcgggccgagttccgggccgaaaccgccgatcgcggcgaacgcaatcggaaccaggatcagcgccaccatggcggagagccgttttgtcatgatcaatgccatgaacacgatcaccatcgaataggcgagcagggtcaacatctttttctgtatctctttgccgccctgcagcgtggggcgcatgcgggcgggagtgtgtgtgcgtccgtgcggcgcacgaggttaaaagcaaggccgatcccgccggcacgccagggcgtgccgggtatggaatgactgcggagggtggcagtcttgcgcgctggcccgggcgggccgcgcgggcgcggctcagctggcggaagcgatgcgtttcactaccgcgtccgcgaactgcagcgtggtggccgtgccgtggaggtcgccggtcttcacctggtcctggaccagcgtcagctcgatggccgtgcgcaggcgcgtggccaggtcctggcggcccacgtggtcgagcatcaggccggcggccagcatcagcgagatcgggttggcaatgcctttgccagcgatgtctggcgccgagccgtgcaccgcctcgaagatcgcggcctggtcgccgatgttggcgcccggcgccatgccaagcccgccaaccaggccggcgatctggtccgacaggatgtcgccgaacaggttggtacagagcagcatgtcgaagcgccacgggttgagcaccagctgcatggcgcaggcgtcgacaatgatgtcgtccatgtccacgcggcccgcgtagtccctggcgacttcgcgcgccgcttccaggaagatgccggtgagcgctttcaggatattggccttgtgcaccaccgtgatcttcttgcggccgttcctgacggcgtactcgaaggcgaagcgggcaatgcgccggcacgcgtcgcgcgtgttggtgccggtggacaccgccaccgcatgcgggtcgtcgccaaccgggatgtagtagtcatgggccacatagaagccgccgacgttctcgcgcaccagcaccaggtcgatattctcgaagcggcccggcaccagcgtgcgggcagggcgcacgttggcatagaggttgaacgcctcgcgcaggcgcacattgaccgagcggaagccaccgcccaccggcgtggtcagcggccccttcagggccaggccggtgcggccgatgctgtccagcgtgtcttgcggcaggggatcgccgctgtattcgacgccggccattcccgcgcgccggatatcccaggcaaacggggcgcccagcgcttccagcaccctgacggtggcgtccactacttcgggaccgatcccgtcgcctgggatcagcgtggccgggatctgttcgcgtgcaccgttttccatttgcgttcctgtcgtgaattgagcgtttcgctggccggccagggcgccgggccagggaggctgtgtttctcgtcgccggggggcgccggttgcggattccggcgtttgccgccggtccggatgaccaggggcccgattctaggcggggaaggctgtcaggaaactgtcaatgtgccggctatgtcattggggtttacgcggagggcgacgaaccctgctgacggagaacgaccgacgaatcggggccggcgacagtgaaagcatcgccggtgcagtgcgccaggactggccgcgacgatgaacgcgcactgacgcccggagccgcgctaagcgggcaggcgtgccgccttgaattgtttccagaggcagcgcagcggctgccggtcaacgctgacagcccttgcgatatagccgcgcgcatagccacagccaatggcaagctgctgccgctctgtcgccaggcgcagcaacaatccctctgcaaccgccatatcattgcgccatcccaggtcatcctgcaggcgcgacagttgccggcgatagcggcgcaccttattcgcggcaaacaaggattcaaagaactcggtcgcgtagcgcagcttctttgcggcgatacgcgcacgatggcgccgctgctcatcgagctttgccatgccccgcccccgcttgagcagcctgcgttgccgtttgcgcagcgtggccagcgcgaagtccctggcgggtcccgtgagtgccgcgcgctgcgcctcgtcaaggccatggcgccagtccgcgctgcccagccaatggctcagcgtcaggatcagccgggtgtaacgatcggaattcacggcctgggccgcgcgttgccgcgcatcggctgcgactgccttcgccgcggcaagcaccgcgcccgcgcccacgtcctccggcgccccatcgaatgcgtcacgcaaggtggtgttggcaagcacttcccagtcacgtgcggggcccagttcatcggcaatccatttgaggtccgattgcagtgccggcgggcaggcaagcagcggctcgaagatatcaagcgcggagcgcaggcgacgcaggccgacacgcatctggtgcacgctctccggattggagccattgaccacgccgcgttcgttccccgagatttgcgccaggcagctctcggcaatgcactgaaacactgcttcagccgaccctgcttcggccagtctgaggggctccgcccgtagcgcttcattggcctcgtcagcgaccagcgcatagccacggtcgcctttgctggcgcggctcaggcgcattggcactgcgtcgagcagccgcagggcaaacgctgacagatgggcgggctcaccggtctggatctccatctcaagctcgcggatcggctccgtggcgtcgttcgcgcggacaacgccgcgatcgaccgccagttcgacctcgtccccctgtggcaagcgcaacagcagcaccgtgcgccggacatccgtgatgaagatcggcttcagccgttccgccaggtcgccttcacgcagcagcgttcccagcgcagtgccctcgggcaatttgtctcgcagtgcaccaagatctggcgcatttccgggaactgccgactcaaactcttcccgctcgtaaagcgccccatgctgcgtgccccaggtcttcaacgtctgtacataatgttcacctgcttgccgcacacgcagcgaggcgtgcatacgccgaaaggcaagatccgacgtatcgaaatacgtgctcacgagcctgtcttcgtgcggcggctccacacagcaggacgacaccaggggcaagccgatcagcccttcggcctggtcctgcagcaactcgagcttgagttcgcgctccatttatccgagctttgccgtgccctcgaatttttcgaataccctggcctggactgcgttcatcactgcaagggtctcgtcactggcagggccgctggtcgtcaccccggtggcgttcttcggcttcgagccgcacgggtcgaagacaaagaccgtatcgaactttccggacgattctttcttcaggcgccggttgagtgctttcaggtatcgcttcttgtcagtctttgacataggttccaaggttatctgcggtggcaataacgacccaggtcattgaaccatctgcttaatgaactcacttcaccaggcagcctgctagtgcgactggcttgcattcgactccccgccggggaaggggctttcgtgctcccgcaacttctgcagcgatcgggtcagcctggcgccgtgcttgcggtccgcggccagcagcagggcctctatgccgtcgtccaggcccgccagctcgcggtcacccggtagcctggtcgctttcatctgctgcaattcgttggcaatgcgcttgcccagcttgcgcacaaactccgggtcaaggtgaccttgcgctgcagcacctccaatatgctcgatcaagcgcatcagaccttcgggggtggtctcggtcgcagatggtatttcgtgtgtcattggcggctccagtgggcgcgtcagatcattttacgcagcgaatgctcgtaagatggtacgtatttcgcgggaccagtgcgatcagattcgcctcgatatgcgcaatacgccagctagaatcgggaaggattcccccgcaccgacattccaatcatgaaacccgaatccgatcccatgcagaatgcgccgccaattgacgcggaggaggggcgcctcggcaccccggtcgacccggatggcctgctgaatggcaatgagctctatatcaaccgcgaactcagccagctggagttcttcggccgcgtgctggagcaggccgccgatcccgcggtgccgctgcttgagcgcctgcgtgccctgtgtaccttcagcagcaatctggatgagttctacgagatccgcgtggccggcctgaaggagcagtgcttgcttcagtctccggtggtcggcccggacgggctgacgccgcaggcggtctatgccagggtcaaccaacgggtccgggaactggtcgatcagcagtaccgcctgttcaatgacatgctgattccggccatggccgagcagcagatccgcttcttgcggcggccctcgtggaacctcgcgcaggcggaatggatccgggagttcttcttcgccgaactgatgccagtcctgacgccgatcggcctggacccggcgcatccgtttccacgggtgctcaacaaaagcctgaatttcgccgttgaactcgagggcaaggatgcgttcgggcgcaactccggctatgcgatcgtgcaggcgccacgagcgttgccgcgggtgatcgccctgccaccggagatcgccggatgcgaacatggctttgtgttcctttcttccatcctgcatgcccacgtcggcgagctgttcagtggcatgaccgtgcgcggctgctatcagttccgcgtgacccgcaacagcgaactgttcgtggacgaggaagaggtcaagaacctgcgcgaggcgctgcaaggcgaactgccgcaccgtcattatggtgatgcggtccggctggaagtggctgacaactgcacgccggcaatgactgggttcctgcagcagcagttcggcctggcggcaagcgaggtgttctccgtcaacggaccggtcaacctggttcgcctgatgcaggtgccagatcaggtggaccggccggaactgaagtacctgcctttccgggccggcctgccgaaggtgctgcacgagcattccgatatcttccgcgccattcgcgagggcgacatcctgctgcatcacccgttccagtcgttcacaccggtggtggactttgtcaggcaggcggcacaggaccccgatgtggtggcaatcagccagacggtgtatcgggccgggcacgactcggtcctgctctcggcactgatcgaggccgcgcgcaacggcaaggaagtcaccgtcgtggtggaactgctggcccgcttcgatgaagaggccaatatcggttgggcaacgcaactggaggaagtcggcgcgcatgtcatctatggggtcgtcggcttcaaggcgcacgccaagatggtgatggtattgcgacgcgagggtgggaagctccggcgctatgtgcatctcggaaccgggaactatcaccaccagaccacgcgcacctatacggattttggattgctcacctgcaatgagtcgctgacgcaggatgtggcgcaagtgttcagccagctgactggtcgtggccagacccattgcatgacccatatctggcaatcgcccttcaccttgaagacggggttgcttgaagcgatccggcgcgaagccgggcacgccagggccggccgcaagggatggatcgtggtcaagatgaatgcgctgctggaacccgacctgattcaggcgctgtacgacgcctcacgcgacggagtccgtatcgacctgatcatccggggcgcctgtgcgctgcgccccggcgttgccggcctgtcggagaacattacggtgaaatccgtcatgggccggtttctcgagcactcgcgcatcttttattttcacgacggcggggcggaaaaggtcatgctatccagcggtgaatggatggagcgaagcctgtcccggcggatcgagatctgctttcccatccttgatgccgggttgaaggagcgcgttatcgcggaagggctgaaaccgtacctggcagaccggcgtgacacctggcagatggcgccggacggaacatacgagcgtcagggctcgcgtgatggcgagggcgcgcagaatatcctgctgtcggcgttgacgtgagccctgcataagggccacgcaggcgcggcaccgcgcctgcgtggccgtgccgctgctcaaccgagatcgtcctggatcggccggtgtctgaacaccgcgcggatgatgccatggtcgttggtgcccaggcccttgtgatcgctaaagttcaggtgatcgttgttgataatgagcccgtcgaacagccagcggcgccgcttgctgttgtcatatagctgctcgctgaccaggatgtgatcaagcgattcgcgaaaatcctggaagacatgggtgtagtagacatcgcgcgtgtcccggtattcctgcaatgtctgcgcggtatagagcgcaatatcgccaccaccgaccgagtcacccaccagataggcaggctgctcggtcaggatattggcggtattgctcagttggccgtcgttgatatcgcccatcaccaccactgcggtgttgttgcctttcatgctgtcggtcagcatgaagcgcagcgcggccgcttcggcggtacgccggatcgtcgacaacgcagcgccgacggctttggcatgtttcgcgtagatttccttttcataccaggcctcgccatcgatccgggtcggctgcttcgacttgaaatggcatacgtacatgtgcatggcaggctcatcctcgcgcggccggatggtgaaatgcaggaccggccgggaaaagccgcgaatactgacgctgatctgcggtgtctgcggatcgtctcccttcgatttcagcacgaatttctcgggaaaatcggcgatccactcggcctcgcctgcgagcaatccgcggcggacgatggctgcgcacacaatgcccttgccattggcgttgtccggcaccagcacgtcataggcatcggccaggccggcggcctcgactgccgcgagcagcccgtcgccatgccacagctcctggaatccgaccacgtcggcgtcgatcagcttcagctggctcgccgtccaggcgatcttgcgctcgtattccttctcgctccagccgttgcggtcggtatagagaggcaggcccggcacattcaggttgtacaggttgaacgtcgcgatacttagtgtcttcaggttcatggcggactctccgttggcgcatgcgcgaatcgcccccggagttcagcaagcctggcgcccggtgtctatctcgtttcgatgacaatcgccgggccacgcgaggatacccgcgggtcgacatctcacagcccgatcgtgccgagtgggtattcggacagtggcctgccttcaccattaattttctgtcgcccatgacgtttcatttgctatacatactttttccgactgctctggcggcctgtctaatacttcctcgctaagccgttcagctcgcgccggcattccactccagtggcgattgacggcattttcggggcgctggaaaacagtgtccgcggtggctgccggagcctccggaagccactttccatggccggaaatgccttgtcctgaaaggcttcacgggaattacgcagccccgcggcgactgtaccccgtgaatagtgccgagcgctccggcattatcccgcgcgggcattttcatccgcgctgcgggacgccatttcgcataaccgaagctcgtccatagagccgattttccattccgattccgccagctagattgacctcatcgttggcgcttgccaaggctgacgaattctatgtgctcaaaagccagggaaaggggtccatccatgaaacgcatccatttgaaacttgtggctttgccgctcgcctgtctggtcatcacggccgccggttgcgggggaggcggggggggcgaatcgacgcctgccagcgccgccgccacagccccaggcacgggaacgtcagcgccagcgtcacccacgacgccaacaacgcccgcaacgcagaccgccgccagcagcagcgccatgctgtcgggtaccactgatcccgggcccgagatcggcaaagacggggacttctacctgaataccgtgacctggatgctgttcgggcccaaggcaaacggcacgtggccggcaggggtttcggtggcgggtaccggcaataccggagcggccgggaacaccatcctgtccggctcggtcgatccgaccgacagcgtcggcaacaatggcgactactacatcaatacctccacctcgaccctgttcgggcccaaggcaaacggcacgtggccgccgggcgtccagatgggtggcggcaccgggtcgggcaccggtggcggcgtcgtcctgacgggcgcgggggcaccagccaacagcgttggcaacaatggcgactactacctcgacaccgatacctggacgctgtacgggcccaaggccaatgacgtgtggccggcaggggtctcgctggtcacccagccgggcggcagcggcggcaccggcggcaccggtggcggcactgcaggcaatggcggtcacatcctgtacggcagcggtgcgccgaccgacgacatcggcgtcgatggcgacttctatttcgacaccacgacctcgacgctgtacggtcccaaggcgggcggcaagtggccaacttcgggcgtgagcatggggacaggcaccgtctacaacggcaacttcaacgtgccagccacgctcagccgcggcaactatgccatgaccggcgccggcggggcggttcccttgccttcggacttcggcgtcgtgatcccctacgattgcagccgtgtcacgctcactgccaccacactcggcaaggtgcagggaacgctggacatttcggtccacacggtgacaggggccggcgcttcagcgaccatcacgccggtcagggacctgagctgcaagatcagcaatggccagcagagctgcagccaggaggtgccgtccggaaccgtcaaccgcaacgacaagctgcaggtacaggtcgacaccaaccaggccaccgattggggaggcctcaccgtcaagcttgcctgcgtcatctaagccggttggacgggggcgcgcgtctgtgccggggagggcagaccggcgcctgagcggaggcagggcaaattgccctgcctccttttcatttccccaaggcgcctggcatggtgaacgactgcgtgcagcgcgttcggcttgacctattgcataccgggacagtgcggagcgccgatgaccccggccgggttgaccgaggatgtcggccaccgctacgagatgcggtttccgctcaacgtgacctgtcggtggggacctggcagagcagttcgggcaacacgtcggcatcgccgacgccctgatgcgtcatcggagccgcgcctgtctggccggacaatgactagccaccagcgcggaccacatccgcagccggcagcctgccccgcaggcatagtgccctgagcgtcgaggcaagcagccgctcccaacggcgccgccatgatggccgcatcgcgtcgccgggccacgggcacggctgtgccggctccgtatcggctgacacggccgcttgcagcgttggctgcgcgaagacggcgtgcccgctgtactgggtcagcagttcctcgcggctgacttcctgcaccccaccgccccagcctggcagggcgacgagaaaccgtccgtgctcgcagcgctgcagcagtacgcacggcctgttcttgtccagcaacagcatggccggtatcgaggtatccgggatatcgtcgaggtcgtgctccgccagccgggtcgacaagccggcgcgcgccgccgcagtgcagagcagcggcaacgtcagggcctgcccgtccagcggcagcccttccagcaggaccgctgaaggcaccgtccgttgcagggcccggttcagcaacagcaggcagcccagcaacggatcgtccgcagccgtgagccggctcattgcggcaggaggctcccggcggccagcaatgaaatgcaggtcggaagtgccgggatgcaccgtgggccttatcctgggttgctgtgtgcgccgcgatggcgctgattcagcttcgatgtcttttgctggcgcctcgcatcgtgcaaggtcagccgacgcgtgttgcccgcgcggattccgttcacccatgattccccccccggtttcagtggtgtgagctctactgcgagggtagtgcaccaggttgcgcgagcccatcgtgcaaacaggttagtgcagccgcagcgagactgattcaggattgaaacgcccggggcatgcctggtccctggtgtggaccggccggccccctcaacgccgctgcgccagccagattcccgccgcgatcgcggccagccccaccgcgtggtaccagcggggccagtcgcccagcagcagcgtggacagcagcgccgcgaataccggcgtcagggtgataaagaacaccggcaactgagcgcccgcgcgggcgatggcgcggtcccaggcaaagtaggcgagcagcgagggaatggttgctacatagagcaggatggccgcgaccttgccgctccattgcagcggctggtccagcgtcatcagctcccatgccgtcacgggagcgcttgccagtacgccggtgacgatctgcgcgaacagcagcacgggcaggggcacggcgggccgctgtttgcgcagcagccaggtatagccgctccaggcgatggtggcggccagcatgaacaggtcgccggcaaccaggtccagctgggcgagccggcccagttcgccgcgtaccaggacgaaggtcacgccgaccatgcacagcagtgccccggtgacatgccatggcttcacccgttcgcgaaaacagatcgcgccgatcacgatcagaaacagcggcgtggatgcgccgatcagcgtcacgttgatcggggtcgaggtggtcagcgccaggtactgcagggcgttatagctggcgatcgaaagcacgcccagggcggtgatcacgccggcgtgccggcgcagtgccgcgcggtgctcgatcacgccgcgccaggcaaagggtgccagcagcagccctgccagcacccagcgcacagagttcaaggtgatgggtggcaccgtgccggcggccaggcggccgacgatggcattgccggcccagctcagtggcgggaaggtaagcaggaacagcgttgtccagtcgatgcgtccagtggtgttgctgcttgcgggcatggggagggaagtgcttgcaaatagcgcattatccgccatatgcggcgccggggcgccaggcgccaagggtcaggcagccgggcaggggccagcaagcaaggaagcgcaagaggaaatcgggcggcgaatcagcccgcccgtcgcaggggaatcgtcatggccttgcgcaggccatgaccgcagtcacatgtcaggcgtcccgagcgcccggctgatgcgcaaggcggccagcgtgccgatcacgccagacagcaggtagaggctgaccgccgcgaggccgaacagcgaagacaggcccagcgccaccagcggcgcaaaggcggcgccgaacagccagccgaagtccgtggtcagcgcggctccggtgtagcggaagcggcgttcgaagttcgacgtcaccacgcccgcagcctgtccgtacgacaggcccagcaagccgaagccgaccaggatgaagatgtcctggccggtcgcgccgccaccgagcagccacggcgttgccaggctgaagatgccgatcagcacggccattgccgacagcgtggtgcgccggccgacgcggtccgcgatccagccggaaagcagcgtgccgatgaacgcgatgaagccgcccacgatctgcacggccagcacgtcggagatgctctgcgagcggtgcaggatcacccaggacagcgggaacaccgtgacaaggtggaacagcgcatagctggccagcgcagcaaaggcccccaggaagatgttgaagccttgcgcgttcaccatctgcaaggtgctgatcggctccagctcgtcttcttcgagcagttgcgtgtactcatgggtcaccaccaggcgcagccgtgcaaacagtgccacgacgttgatggcgaaggccacgtagaacggatagcgccagccccactcgatgaattcaggcggggtcaggctggcatgcaggaacaggtacagcgaactggcgacgataaacccggtgggtgcgccgagctggcccaccatcgcataccagccgcgcttgtcctccggcgtgttgagcgccagcagcgacggcagcccgtcccacgacccgccgaacgcaatgccctgaaggaagcggaacagcgccagcaggtagatcgacgcggccccgatcgaggcgtacgacggcaggaacgcaatccccaccgtggccgtgccgagcaggaacagcgacgccgtcagcttgatgccgcggccccagcgccgctggatgcgcatgaacagcgcggtgccgaacgggcgtccgataaacgcaaacgagaagatcgtgaaactgaagagcaaccccgccagctcgctcgcaaacgggaagtagaccgccgggaagacaagcacggaggcgatgccgtacacgaagaagtcaaagtactccgaggcccgtccgatcaccaccccggtggcgatctcggcgggtgccacctggtggtggccgggcgccggaggtgcagtcggcgatgcgcgatgctggtgggtgaggctggccatcgtcaagtctccttctggcaggagtgcgtcgatactgcacatggagccgaccccattccgatgaaattggctcttaagtctcgcactgacaagaatagcgcctaaactgccatagaaaaacgaaaggtgagttcgccggcagtttgccgatattcctcagacgccacttccgagactatgggccgcttcgactctgtagtgccgccaagacgtgtgcagggaagactactgctgcgatgtgccgccgcagtcatgctggcgtgcctggccggttgtaacgcagtgctgcttgcgccatccggcgacatggccctgcgccagcgcgacctgatcatcattgccacctgcctgatgttgctgatcatcgttccggtgatcatcctcacgctgctgtttgcgtggcgctatcgggaaagtgcgaccgatgcgccctacaaccccgactgggaccattccactgtgctcgagctggcgatctgggccgcgccgctgctgatcatcatcgcgctgggcgccgtgacctgggtcagcacccaccagctcgatccgtaccggccgctgacgcggatcgacgcaggccggccggtcccggcagacgtgaagccgctgacggtggaggtggtggcgatggactggaagtggctgttcctgtatcccgagcagggcatcgccaccgtcaacgagctggcggcgccggtcgaccggcccatcgctttccgcatcaccgccacctcggtgatgaacgcattcttcgtcccgtcgctggcgggcatggtctacgccatgcccggcatggaaaccaagctgcatgccgtgatcaacaagtccggcgtgtatgaaggcttctcggccaactacagcggcgcgggcttctcccacatgcgtttcaagttccatgggctgtccaaccaggacttcgagagctggatccagcaggtcaagtcgtcgggccagggcctgtccacggatacgtacctcaagctcgcgcagcccagcgagcgcgacgcggtgcaacgctatgccagcgtggcgccaggcctctacgacctgatcctgaaccgttgcgtgggcggcgggcggtgcatggcagacaccatggcgcttgaccgcagccgcggcaaattcgacccgttcgccggcatctgcacggcgcgcaacaccgcggccacagcgcccgtgttcgcgtcggagtccgcgcgcaatgacggccgggtgctgctgcagtaaggtgcggatccggatcttcccttgcggtactggccagccccatcggccatggttggttaattcaggccccaggtgacaaacatgcccgagcgctcggaactcgccaatttgatcttcggccggctttcgtgggaggccctcccgctgcacgatcccatcctgctcggcaccttcatcgtggtggtgatcggtgggggcgcaatcgtcgcggcgctcacctactatcgcctctggggctacctgtggcgggaatggttcaccagcatcgaccacaagaagatcggcatcatgtatgtgatcctgggcatcgtgatgctgctgcggggttttgccgacgcgatcatgatgcgcatccagcaggccatcgcgttcggcgacaaccttggctacctgccgccgcaccactacgaccagatctttaccgcgcacggcgtgatcatgatcttcttcgtcgccatgccgctggtcacggggttgatgaacttcgtcatgccgctgcagatcggcgcgcgcgacgtggccttcccgttcctgaacaacttcagcttctggatgaccacgggcggtgccatcctggtcatgatgtcgctgttcgtgggcgagttcgcgcgcaccggctggctggcctatccgcccttgtccggcatcatccacagccctgacgtcggcgtcgactattacatatgggcgctgcaggtggccggggtagggaccttgctatccggcatcaacctgctggtgaccatcgtcaagatgcgggcgcccggcatgacgctgatgcgcatgccgatcttcacctggaccgcgctgtgcaccaacgtgctgatcattgccgcgttcccggtgctgaccgcggcgctggcgctgcttgcgctcgaccgctacgtcggcaccaacttcttcaccaccgagctgggcggcagcgccatgatgtacgtgaacctgatctggatatggggccatccggaggtgtacatccttgtgcttccggtgttcggggtgttctcggaagtggtcgccacgttctgccgcaagcgcctgttcgggtacgcgtcgatggtctacgccacggtagtgatcaccgtgctgtcgtacctggtctggttgcaccatttcttcacgatgggatcgggcgccagcgtcaattcgttcttcggcatcaccaccatgatcatatcgatcccgaccggtgccaagatcttcaactggctgttcacgatgtaccacggcaagatccgcttcgagccccccatgctctggaccatcggcttcatggtcacgttcgtgatcggcggcatgaccggcgtgctgctggcggtgccgccggctgacttctccttgcacaacagcctgttcctgatcgcgcatttccacaacgtgatcatcggcggcgtgctgttcggcctgatggcaggcattacttactggttcccgaaggcattcggctatcgcctggtctcgtcctggggcaaggcatcgttctggttctggctggtcggcttctactttgcgttcatgccgctgtactggctggggctgcatggcgtgacccggcgcatgagccatttcgaggacgcgacgcaccaggtctggttccagctggctgcgttcggcgccttgctgatcgccatcggcattgcctgcttcctggtccagctggtggtcagcttcatccaccgcgaggagcttcgggacctgactggcgatccgtggaacggccgcacgctcgaatggtcgacttcatccccgccgccgcagtacaactttgcctttacgccggtagtgcacgacaccgacgcctggtggcacatgaagcagaatggctacgcgcggccgcagcagggctttattccgatccatatgccgaagaacaccgcggccggcatcgtgctcgcggggttctccacgctctgcggtttcgcgttgatctggcacatctggtggctggctgcagcatcgttcgcggcgacgatcatcggcgcgatcatccatacgttcaactaccagcgcgactattacctcccggccgacctggtggtccagaccgaagcggcgcgcacacaacggatggctggccatggctgacacgacctttcccaaccatgtgagcggcaccggcaccgcggacgcggccccgccgggaggctaccagttctacctgcccgaagaccatcacccgcagaacgggacgctgctggggttctggctttacctgatgagcgactgcctgatattcgcttgcctgttcgccgcgtatggcgtgctgggccgggagtatgcggggggaccgagcggggcagagctgttcgagctgccgctggtggcactgaacacctcgttcctgctgttgtcttcgattacctacggctttgccatgctgcagatgcagcagaaccgcatcgccggaacccagatctggctggccatcacgggggtcttcggcgcggggttcctggcggtcgagctttatgagttcgcgcacctgatcaatgagggcgcagggccgcagcgcagcgcgttcctgacctcgttcttcgcactggtcggaacccacgggctgcatgtcacgtgcggcatcatctggctggtcgtgctgatgacccaggtggcgcagcacgggctgatcacggccaacaagcgcaggctgatgtgcctgtcgatgttctggcactttcttgacgtcgtctggatcggcgtctttaccttcgtctacctgatgggagcgttgccatgagcgcgcacgacgaaacgctggacagccacggacacagccacgggcatgacgaggacgtggggccgcatgccacgctgggcggctacctgacgggcttcgtgctgtctgtcttcctgaccgcgatcccgttctggctggtgatgggaaaggtgttcgacaagtcgtccaccaccgccatcgttatcctgctgatcggggccgtgcagatcgtggtgcacatgatctacttcctgcacatgaacgcgcggtcggagggcggctggaacatgctgtcgctgatgttcacgctggtgctggtggtgatcacgctgacgggttcgctctgggtgatgttccacctgaacagcaacatgatgccgaccatgcagcatgagcgcaccaccgacgccggcactgcgatcgtgccgcccaggaccaagtaggaacaggtccacgcaggcgggaatcggatcccgcctcattcccgttcacggagcctggcatgcgcgcaacgcgccttgtcgcgaccctgtgcctggcgctgctttccgtgccggcttgcgcgcagcggctggccgtggaggtcgagaacttcagcacgccaggcccatgcgcggaagaagacaatgtctcgttcgcgctgtccgccgccgcggttggcaggttccgcatccaggcattgcatccgccctacgtcaacgccatccgcattgacagctccgcgccggatttctccgggtgcaacttcggcaagacgcctcacccgactgatccccgccatgtctttgtgccgcgcacggtcaccctttacgacggcagggacattgccattgtcgggatcacgttcgcaagcttctggcggccacatcgggtgccggtcacggtagcgggcagggccgatgccggttttcacctgatccaggtgttccggaaatccgggcggacccgtaccgaggtcctggtgctctatcccgccgatggctactggcgggcgaaaccgttgccggcccgccacctgggtgtcaatgcctatggctcttcgttcctgctggggccgatagagcaggaggggcgcccggtggtcaacatcgctcggatagaaatcgagccgcagcccttggctttcacgctgcatttcactggcggaggccaggcaacggtcgcgatcactgaaatcagcgacatgcgtactgcgctcgatgtccggttcctgccggcctatgacgccaagcgcgcgttcgcgatgctgcgctccatgtatgttgccgacgacaacgcagacgcgagcgaggtcacctggacgaccgggccggctggtgaggccatcaggaagccggtgatggcagttacttcaatgcaggcaaccgcggtgcgattcggccgtaccgtccggtcgcgccacaacaccagcgcccccgattttttgttcgatgccttcgaggcgcccgcgacggagggcacggcgccaacgggcaagaagccgggctgaatcgatccccggcaacctcgcgacccagccaaatatattcatgtcgacaataaaaattgcgactgctatgatttgcgcacgatagcctgagccggtagcaatcgctggccgcccaatggtggggctggcagcacttttcaggctggggaatagtcgagagaactggggacgacaatgtcatcactgaagaagctgctcgccatcacattgtgcgcagaggcaatcattgccctgtgcgcgccagggccgctgcaggcacaggaagcctggcccgcacgcccgattcaaatgatcgttccgtcgtctcccggctcgggaaccgacgcgctggcgcgggccatggcgcagcgcctttccgaatcgctgaagcaggccgtggtcgtggagaaccggccgggcggcagcggggtgatcggaaccaatgccgttctcaaggcggcgccggacggctacacgattctctacacaacggcatccaacatggtggttgcgcctgccgtcatgaagtccatatcccaggaggcaagaaagggcctcatgccgatcgcgcagacagccgcgggtggggtgttgctgctggtgagcccggacctgccggtgcacgacttgccaggactcatcgagctggtgaaggcgaatccggacaagtacagctatggcagctgggccaccggctcgtccgcgcacttgaccatggaatggctgaagaagcagaccggcatgaagaccgagcacgtcgcatatcggacaacaagtcaactgctcaccgagctttcctcaggggtgctgaagatcggctggaccgatcccagcgtcgcggttccgttcctgcgttccgggaaggtgcgtggcattgccatcgtcggcaacgtgcgctcgccacagcttgccgacgtcaagaccatgagtgaacagggctacaagttcaacacggtgggatggttcggcatgttcgccccggccggaaccagtccggcgatcgtgaagcggctgtccgatgaggccaacaaggtgcaggcattgccggagatcgcggcgctgatgaagaaactgaacttcgagccgccgccggtaaagacctccgcgcagctgggcgagatcgtccgcagcgatctgcaagtctggtcgaagatcgctagcgacgcagggatcagggtcgacgaataggggctggcgccccgtcattgcggcctgcccagcggcccactgcccgccatgatggcagccggccgtcaacgatccagtgcgcctgcaccagcgaatccttgtcataagaaggaaagttcaaggcgtgccaggtaaagcggaacgttgccccctgccagatgattcgatcgtcgcgaaacacacccagacatcaacccatccactgcatccccaaaccggtttgtccttcggcgagctcaaccgccgatccgcaggtgaacggtcatattcgatagagaacaggagacggcatggcgaaaatcgttaagttctatgaaaccggcggacccgacgtcctttgtcttgaggacggcagcgttggtgagcccggagcgggggaggtccgcgtccgccacgtggcggcaggcctgaacttcgccgatacctacttccgcagcggcacgtacaaggtgccgctgcccagcggcatcggcaacgaggccgctggcgtgattgaggctgtcggtgccggcgtcacccatctggcggtcggcgaccgtgtgacctacaccggatttaccaacacgctgggcgcctacagcacggagcggctgatctctgccggtccgctgatcaggctgccgcaggcaatcagttgcgaagtcgcggcggccatgaccatgcgcggtttgtcggcggcctacctgatgcgccggatctaccccttcaaggcgggcgactccatcctgctgcatgccgcggcaggtggtgttggcctgatcgttgcgcagtgggccaaattgttggggctgacggtgatcggcacggtttcgaccgatgccaaggccgaagtggcgcgcgcccacggctgtgaccacaccatcaactacagccatgaggacgtggccaggcgcgtgcgggaactgaccgacggcgtgggcgtgaacgtggtcttcgacagcgtgggcaaggacaccttcatgtcctcgctggactccctcaggcgccgcggcctgctggtgtgcgtgggtttcgcctccggcccggtaaccgggttcgatccggcaattctggcccgcaagggctcggcgttcctgacacgcccgggcctggccgactatatcgccgatcctgccgagaaggcggaactggtcggcgagctgttcggccacgtggcggctggccgcatccgcatcgggatcaatcagcgctatgccctggaggatgccgtgcaggcacaccgggacctggagtcgcggaagaccaccggctcgtccattttcgtgatttgacggcacgaagcagctgtctcatccatcgaccttctcaagattcacatctcaacccggagatccaccaacatgaacttccttgacggccacctgtatcccgagaaccagcagcctctgatcatcaccgccgctccctatgcgccgggctggatcccgtcagacttcccggaagatatcccggtcaccatagcggaccagatccagaaggcggtggattgctatgaagccggtgcgagagtgctgcatctgcacgtgcgcgaagaggacggcaagggcagcaagcgcctgtccaagttcaatgagctgatcgccggcgtgcgcaaggcctgtcctgaaatggtcatccaggtgggcggctccatcagcttcgcgcctgaagagggccaaggcgccaaatggcttagcgatgacacgcggcatatgctggccgaactcgatcctaagcccgaccaggtgacggtgaccgtcaacacctcgcagatgaatgtgacggagcatgccggtgtggatgatttcaaaggactgtcgcgagggttcgcgcacctctacgatacctacaaggacatggtcgtgccctcgaatcccagctggttcgaggagcacgttcggcgtctgacagccgccgggattcagagtgagtttcagtgctacaacatcaacagctttgaaacgattgagcggatgattcgccgcggcgtctacaagggcccgctggtgatgaactgggtggctatcagcggcggcatggatcaggcgaacatctacaacctggcaaacatcctgcgcgctgtgccggacggagccgtggtaacggtggagagttcggtgttgaatgtgcttcccatcaacatgatcggcatggccttgggcctgcatgtgcggtgtggcatcgaggacgtgctctggaaccagacccgcacgggaaagatgagcaccgtcgagcagatcaagcaactggtgcgtatcgccggcgaatttggtcgccccatcgcgacggcgcagcagacccgcgagatcttgcagcttggggtcttctacgacacggtggaagagacgcttcagaagaatggcttcgcacccaatcgtaacggtggccaccagggcttcctgcgcaaggccgaatgcatgtaaagagcccttggaggaactgacggcccggcatcccggacccaacatgtgatggcgaaggcgggacccgcgacggtgtgggtcccgctctttcgccttgctgccgtggaccccccagacctcaattgccgtgtggccgataccgcgagcagggttttccctctgtttgcgcgaatcgacaacaacttggcgtgatcggtcaagccggttgacgcgtggcgatccgagaattgagaaaagacggcaatcaagaggtacagacatgaggaagcgaaccaataacctatggtggcgcggatacgccctggcgatcggagtcggtgtcgtcggtggggtgcccgtggctcacgcccaggaggattggccaagcaagccgatccgcctggtggtggcggggcctgccggcggcagcgccgacgccctggcgcggctgctggcggaaggcctgcagaaggcgtggagcaagccggtgatcgtggaaaacaagcctggtgccgccggcgcgctggcgatcagcgatttgcaggccaccggcaaggatggccatacccttctggtcatccagggcggtgtcgtcagcgaagcgccgttggcctacaaggtctattacaagccctttgccgacctgaagcccctggcccaggtcagccgcacggggttggtgctggttgccaacaaggatgtgccggtctctaacctcaagcagttggtggactacggcaaatcgcagaaggacggcctggttttcgcttcctacgctgcgggattgaggggccacacctcgggcatactgctcgggcaactcacccacgtgccaatgcggcatgttggctacaagggctctcctccggcattgaacgacctgatgggcggccatgtgccgctgatgttcgatggggtgactacctcaatgccgctgatcaaggcggggaagatcagagcgattgccgtggcctatccgacccggattgccggattggcggatgtgccgacgttcaaggagctcggttacccgcagctggcgcaagcgggctggttcgccgtgtggtcgcgcccggatgtcgctccggcggtccagcaaaaaatccgcgaggcgacgctggcgtatttcaagcagcccgcagtgcagaaccgcgtcaaggatatgggcatggagcaggggaatgccgccacctcggaagagatgatggcggacctgaagcaggcataccagcaacaggccgcgctgctgaagtccatcaactaccagccggaataatacggcagtcacccggccgcgcaactgggctgggtggtgactaccgttgcggcatgcccgaccggtcgtgtcgatctttcagtaaggcgcgtcaccgataattgcggtgcgctccatcttccggtggcacggggggtaatccatcactgcgtagtgctgggtcgaacggttgtcccagaacgcaacactgtttttcttccagcgaaaacgcacctggtactcggggatggtggcctggctgaccaggtagctaagcagatttgcggcacccggcgccttgtcgatgccgaagcgcacattggccggcacgttgtagttggtgaagtgcgtggtaaagcttccattgacgaacagcactttctctccggtttcgggatgggtgcgcaccaccgggtgctcggcgtccgggtactgggccttcagcgcaagacgcttttcgatcggcatggcggcaccgaagctcgcctcgatgccgtggcgcgcgcgcaatgtggcgatcttcgtcttgatatcctcgggcaactggttgtaggcctcgaccatgttgacccacatggtgtcgccgcccacgggtgggcactcgatacagcgcagcacgcagcctagcggtggcttctcgcgccaggtggcatcggtatgccaggaattctcgttgcggtcgggaggactgtccggggttttgtagatctggaccagccccgggtaatcgggatggctgcccaccaccggatggtcctccagctcgccgaagcggcgcgcaaaagctacgtgctgcgcgcgcgtgatgtcctggtcgcggaagaacagcacgcgatgtctgaggagcagggcgcggatttcagccatcagctgctcgtcttcggcagccgcgccgaggttgacgttgctgagctcagcaccgatcgtgcaggtgactggctcgacctggatcgaattgcccagagaggttgcgcggaccactgcgggtgccgctttgaggcgttggatcatgaaggttgtctccgatttttcgaacaggccgatcgattcctgcgagtctggatccagcgggtttctcccgcttgacactacatgaccgggatttatcattccatgtcaatgttccactctgctcgctaatgtcgtcacttgtccgcgctgcggccctcaccaactacagcgaggtcgcccgagccgccggactggacccggtgcggatgctccttgacgcgggtttgagtccgggcgtgctgcgcgagccggacctcatgattccggttgagcgtgtcggacgactgctgcaggcgtcggcaaccatgtcaggcaacgagagtttcggactgtgcatggccgagtcgcgcctgttgtccaatcttggggccgtaggattgctgatccgcgaccaggcgacgctgcgcgactcgcttcgcatgctgatgcgctatcaggcgttgctcaacggtgcgctgtcgctggcggtagaggagtgcggcgaactggtcattattcgcgaggcggtcatcgctggcagcgcacatcagcccacgcgccaaagggttgaactggcgctgggggtaatggtgcggctgatacgccagcttctcaagcccgactgggagccgcggcgcgtatgcttcgagcacccggcgccgcgcgaccttggtacgcaccaacggttttttggcccttgcgtcgagttcgactatgacttcaactgcatcatctgcgcgaaggccgatctcgatgcacgcaacccgtctgccgatccggccatggcgcgctacgcgcagcagctgatcgacgcgtctgtcatgtcgcagcacgcgaccatgctagaagacgtgcggcgcattgtcctgctgctgttgcccagcggacgttgcagcatcgagcaagtggcggaccatctgggcgtggtgtgccgtacggtccagcgccggctggcggaagagggacaaagcttctcgtcgatcgtcaacgacatccgcacggagcttgccgcgcgtcatgtcatcgagagcgatcgttcgttgaccgaggtggcgaccctgctcgggttttccgcgccgagcggattctcgcgctggtatcacgcgcaatttggttgcagccccaaggagagccggtccacgcgcggcacagtgcgccgaaagaccactgcttagcctgcaccgaccgtgatgccaccctcggccatccgcccgatacgccacgtaaggtaagatcttgggcgctgcgagcggtgcagcgccgatcgagggcaacacccgaccggttccccaataatcggaaggacttacccctcatgggcagactcaagactaccaacacgccagaactgcagtcgctgcttgcgccgcaaacaccgcagaatccggtcacgctggcggtcgagcaggcgcttatgcatggacgcgactggtcggcatccgtcgccgaccagattgcggtgcggctggcgggactgattacgatcgacgtgatccacgcaggccaacgcctgcttgagaaagacatcagcgaggtcctggaggtcagccgcgctcctgtgcgcgaggccttgcgcatcctggagcgggagcggctggtcgagttccgcgcgcggcgcggcgccattgtcaccgagcccaatgcccaggacctgcgggatatctacgtggtgcgggacgcactgtttgcgattctgctcaggcagttgatggaagaacgcgcggacgcgcttgatgcgttattcgagcaattcatgccgcggctcggcaaggctgtcgaggaatcggtggacgcctatatcagcgtgaccttcctggcgaacatggccatggcagacctgtcgagcaaccggctggtcggggagctgctgaattccatctcgctgcgggtcctgcgctatgtgcggctggggctcgcatcccgtcccgggtcgctggagaattccttcaagacctggcgtgccctgcagcgcgccgtgaccaggcgggacatcgatgcggtcctggagaccgcgcacaagcgcatcggaaactcccgcgaagccgccatccgtgccctggcatccggcgtccggaaaggcaaggccggccctgccggcaacgacgctgtgccagccggcgctttctgagtccgcgcgggcgggactgcccgcttaggctctccggtcaggggacccgcgcccggctggcgaatgcattccactcccggaagaccgtgtccaggcacgatgccgaatcgcagcggtcccgcttcttgcggaatgctgcaatgtcggcgtcggtgattgcccgcgccttgagcaggcgctgctggtcggcatagatgcgctggtagcccatggaaaacagcgcggattcgcagatcaggcgctgcgcctgcgtagcgttggcggcggtggcggacggatcgcagtcgatgtcggtggcatgcgcggtgctcaggaacatgaggcttgcggatgccagggtgtggagggcgatgcggacaatgcgggtcatgacgggttgggggcagggctgacgctcgacgcaaaggcgccgtgtcaggcgaatagtagcgcgccccgatagcgggccgacaggttcactgcatgccggcccgcttcgccgcgcttagcggaacacgctgaccgcctccaccagccgtgttgcctgctgcttcaggctttcggccgcagctgcgctttgctcgaccagcgcggcgttctgctgggtgatgttgtcaaggtcgctgaccgcgccccctacctgggatattccgctgctttgctcggtggtggcggcgctgatctcggcgatcaggtcggatacgcgtttgacctgcgagacgatgtcgtccatggccttgccggcttcgtcgaccagcttggcgccggacgcgacgttgtggacgctgacatcgatcagtcccttgatttccttggcggcattggcgctgcgctgcgccaggctgcgcacctcgccggccaccacggcaaagccgcggccctgttcgccggcgcgggcggcttccaccgccgcattgagcgccaggatattggtctggaaggcaatgccatcgatcacgccgatgatatcggcgatgcgcctggagctctcggtgatctcgttcatggtgttgacgacctccgacaccgcctgcccgccgcgctccgcggcgacgctggcggagccggacagcttgttggcttgcgccgcggtctccgcgttgctctgcaccgtggaggtcatctgcgccatcgacgcggaggtttcctgcacgctggacgccgcctgttcggtgcgcgcgctcaggtcgatattgccgcgcgcgatttcattgctggcggtctggacattgacgacctggccgctgacgtcgtcgatcagccagcggaacatcaggccgagctggctgatcgtgcgcagcgtcatgccgatctcgtcgacccggttcatgtgcacggccttctggctttcgccggacgccacgcgcagcgcctgctgcaggacctgttccagcggggtggtgatctgccgttgcagccaccaggatgccagcaacgtggcaagcgccatgacccctgcaaagcctggtagtgccatgccggaaaggcccatgccccaggcgccgatgatactgacggggagcagggcggccagcgccagccgcacgcgccagcgtaccggcatggtctggaacagcgaggtaaaggccatcaggcccgtgcgcacgatcagtcccttgtggaatttccggctgccggcctggccctcgcggaaatcgcgatacagcttttccgctgccgctatctcctcgcgtgttgccttggtgcgcaccgacatgtagccggcgggccggccgttgcgcaccacgggcgtggcattggcgcggacccagtaatggtcgccgttcttgcggcggttcttgaccagcgcggtccatggctctccgcccttgagggtggcccacatgtcggcaaaggcttcggcgggcatgtcgggatggcgcaccaggttgtgcggctgcccctggatttcttcccgcgtgaatccgctgacctcgacaaacgcggcgttggcgtaggtgatgtagctctgcgtgtcggtggtcgacatcagcgtggcgttgtccgggaaatcaaactcgcgctgggtgacgggctggttgtcgcgcacggcattcctcctcattctcgatgggcagggggcgcatgccttgtttgctttgcatggattccggcgcgccacggctgccggaccgcgcccccttctccccgccatgtcggccgcagttccctggcgctgatcccctcttccgtaggggaggggttgaatacactcaaacgagtgagggcgacaccgtggcgcagggcgtgggtgtggatctggcgtgcctggcttgctacatccggaacaccgcccccagccagaagctgcgcggcgcgcccggtgccacgaacagcgcgctggcggcatcccccggtgccacgtgcgggcgcaccaggctaccgccggggaacacatcgttcgcgatctgtccgtaggtctcgtagcgccggtcaaagacattggccaagcgtgcatagatctcaaaccgcttgttcaccttgtacgccgcgcgcaggttcagggtggcgtagccgggcacatgccagtcggcggtcttcggcggcgcgcccggctgcgggtcgctgcgcaggccgtcttcgttgccgctggagacggtgcctgacaccgccaccaggtcggcgccaagcgtcaggccggccagtgcctgccagtcgaggcccagcttgagcgtatggcggggcaggcccgccatgcgcatgccgggccggatgtcgatggtgcgttcgccggcggcaagctggccggcggcctggtaggtggcctgcagatagctgtacgcaagccgcagcgtgacatcgcccacgcgctggcgggcggtgaggtccagaccctggttgcgggtgcggtcgaagttggcgaagtagccgagctgggtgttcggcgcgcgcaggaagaggatgtcgtcgtgattgtcgacgcggtagagcgacgcggtgacttcggtgtccttgccgcggtgccagcgcacgcctgcttcataggagtgtgagaccacctgcttcaggtagggatcggcctgcaggccggccggcaggcggcagggccgcgtcgggtcggcgcagccgagttcgagcacggtcggtacgcggttgttctgcgcgtagcccccgaacacggtgacgccgccgcccagcttctgcgagagtcccagcgcggggttgaggcggcggtaggtaaagctttcgcgcggctgtccgctgccgtcgctgttgcgcagggtattgcttacctcgacgtggttccacctggccgaggcggtcaggaaggtgctgggggtcagcgaccaggtgtcggacaggtacaggccgagcatgcgcgagctgccgccgacgccggagaacagggcattgggggcgtccgggtcggccacggcgccgcggtcgtcggtgaaggtgccaggctgcgcgtactgcgaataggtcaggcggctgcggtccagggtcaggccggcgttgagcaggtggcggtcggtctccctggccatgctcagcgccatgccgacggtctgctgccacatatgggtggtgttgatcacggcgggatgcagcgcggcgccttcggcccgggtcatgccgcagtcggcgccgagcgggctgccgtcgggcgcaaagccgtcctcgcagtcttcggcataggcctcgtaggcggggttgacatcgccgttggtggtgtcgcggcggctggtgcgcacgtaggccagcgcggcggcgctggtcttgtcgtcgaaccagtggcggccgttgacgacgacctgggtcacctggttgcgggtctggtcggggtaggtgtacacggcgtggcggttggcctggtagaggtctggcagcgtgccattggcgctggcgtggaagctgggcaccagcccgttgccggtcagcgtgctgcggccgtgcagcacggagacgtccaagctgtcagtgtcgcccgcatagccagccttggcgaagacgttgccaagccggccgcccgactggtcacgccagccatgctcctgaaacagggtgccggccgcgaatgcgtgccagccgctgtcgctgcgcacgccgccggacaggtcggcgcgcttgcgggcgccgctgccgtaggacaggtcggcctcgaagccgggcgagtccagcccggaacgagtggtcatggccagcgccccgcccagggtattgaggccgtaggccgggttggcgctggacaccagcgacacgctcgccagcgcggcttccgggatcatgtcccagctgaccacgtcgccgaagggctcgttgacgcggatgccgtccaggtagaccgacagtccctgcggcacgcccggaatggatgaggcacggaagccgcggtaggtgatgtcggtctggaacgggctgccctggatgtcgttgacgttgacgccggccaggttgcgggacaggtactcggccaggttgccggcgcgcgaccgatccaggtcgtcgccgcgcacggtctgcacggtgtagggcaccaggtcgctgtcgacgccgatgcctggcagcggcgcggcggccaccaccaggacttccggcagcatggcgctgtcctggtttgggacagcggtgtcgtgctgcgcaacagcgggccgctgggtcatcagggcgaccgccatggcaatcgcggtggcggcgccgcggctggtcctgcggcggcaagccacggtgtcgcgcggcgcctgccctggcggtgcggggcgcgggttggctggcatggttccgtctcctccggataagcggcgcgatacctgcattgggtagcgcctgcccggagctgagcaggtttcgtaccgtgcatcgggagtccggcacttgcgcggtgagcggcccgggaacgcgctggccgaacccgccttgcgccgatgcctgtcacaaaacaggacagctgcggacacaagcagcgggccggtgctcaaccatgggacagtcgttcgcagcgcaccgcacaaggcacggcctggctgcagcgtccggcagtgcgtccggcgcggccaggcaacggctggcatggagcgcggcctgatgctgcgctgcacatggtatcggccttgctctgttcacctgcatcaacactctgcctggtgcttagccatgttccgccgccttggtcgctgccttgcctgcctgctgttgccgtgcctcggcctggtccatgcgggcgcagcgctggccgagggcgcgcacgggtatccgtcgcggccgatcacgctggtggtgccatggccagcgggcggcgccaccgatatctccatgcgcatcctggcggagctggccgggcgcgagctggggcagccggtcgtggtggagaaccggccgggcgccggcggcacgctggtgggaggcttgcttgccgcggcgcggccggacggctacaccatcggccagctgccgctgacggtatatcgcttcccgcatcagcagaagaccgcctggcagccgctgcgcgacatccagccggtgctgatgatctcgggctataccttcggcatcgtggtgcccgcagacagcccgttacgctcgctgcgcgacctggtcgcctggggccgcgcgcatccgggcgagctgaccgtgggctccaccggcatcggcaccaccgcccatctggcgatggaggacgtgctcgggcgcagcggcgtgcgctatatccacgtgccgtatcacggcaccgctgaccagatgctggcggtggccaacggttcgctgatggcgggggtcaattccaccggcttcgcgcctttcgtcgagaccggcaagctgcgcttgctggccgtgttcagcgcgcagcgctcaccgcgctggcccgaggtgccgacggtaagcgagctgggctttgccgatgcggttcataactcgccctacggcatcggcgtgccgcgcggcaccgatccggcaatcgtccgccgcctgcatgacgcattccgtgccgcgatgcagcagccgcgccaccttgcggaactggccaggtacgaccaggagctgacctacctgaataccgcgcaatacgatgacttcctgcgccatgcgtgggagaccgagcggagctttgccgagcgcgtgggcaccgcgcggcccagggggcagctgtgatggccatgcaagcgccgccggcgctgtgctgcgatgccgtgcgcaaggcctttggcagccgcgtggccctggatggggtctcgctcagcgtgcggcgcggcgagttcgtggcactgctcggccccaacggggcgggcaagacgacgctgttccagatcctcagcggcctgttcgtggccgataccgggcaggtcacggtcatgggcagcgacatgcggcgcgatccggtgcgcgcgctggcgcggctgggcatcgtgttccagcagccggccatcgacctggacctgccggtgctggccaacctgcgctttcacgcggacctgcacgggctgccgcgcggcgtggcggcgctgcgcatcgcccggctgctcgatgacttcgggctggcggcgcgtgcgcgcgcaccggtgcgcgagctttcgggcggcaaccggcgcaaggtggaactggcgcgcgcgctgctgcatgaaccggccatgctgctgctggacgagccgacggtggggctggacccggcctcgcgcgcgcaactggtggccgatgcgcggcgcctgacggcgcgggcgcaggccggcgtgctgtgggccacccacctggtgcaggaggtggagcacgccgaccgcgtgatcgtgctggaccgcggcatggtgcgtttcgacggcaccccggccgcactgcgcggcgccgctgcgtgcgacaccctggagggcgctttcctggccatgacgccgcgggcccctgtcactgacccggccgcgaggcgcgtacccgcatgaacaagatgccatctccccgctggtttgccggcgccttgctgctggtcacgacgctgctggttgccgccggcctggccgaaggcgcgcagggcggggccgcgcgacccgccggccaggctggcaaccaggtctttgtctcgagcgagaaggacgatgccctcgccgtcttcgatgcccgcagccggcagctggtcgcggtatggcggcagtgcaagcgcccgcgccacctgcaactgtcgcccgaccggacgcgcctgtacgtggcctgcagcgacgacaaccgggtggatgtggtcgacgtggccagccgcaagaccgtggcatcgctgccggtgggggatgatccggagttgttcgatctcagccaggacggccgcacgctctatgtctcgaatgaagaggacgggctgctgtcggcctacgacacggcgtcgggcaagcgcgtgttcgcggtcagggtgggcgaggagccggagggcgtcaaggtcagcgccgacggcaggcatgtgtacgtgacctcggaggtggccaacctggtccatgtcatcgacgtggcctcgcgcaaggtgatccgcaatatccaggtcggcaaccggccgcggcggctgctgctggtgcgcgacggcaaggagctgtgggtatccaacgagctctcggccagcgtcagcgtgatccgtaccgataccttcgaggtggcccagaccatcgccttcgcgccgcggggctttcgcgccgaggacgtgaccccggtgggcatggcggccagcggcgacggcacgcgcgcctatatcgggctcggccgcgccaaccatgtcgcggtggtcgaggtggcgtcgcgccgggtgcaggactatgtgctggtcggccgccgcgcatgggggctggcgctgagccgcgacaacgcgcggctgtatgtcgccaacggcctgtccgacgatgtcagcgtggtggccaccgccagccgcaaggcggtggccacgctcaaggcgggccgggtgccgcattcggtggcgatcgatgactgagcgctcgcgtgcgtggtggcagtggtggcgtgccgggctgggcgccgtggcgctggggtggctgcctgccgcggtgcacgctgccgaggtgcgcgtggcggtcgtgtcgcaggccgacgacgcgcgctatgcgccccggcgcctggcgcagcgctatcccggccagccgcagggccgtgcgctcgacggcgcccaggtggcggccgccgaagcgcgcgtggcgctcggggccgcgggccagtcgctcaggctggaagcacaggaagcccgcactgaagccgaggtggccccgctggtcgcggcgctggcgcggcagggcacgcgctatatcctgctggacctgccgccggcatcggtcagggcggccacgggcgcggtcaagccgggcgaggccttgttgttcaacgtgtcggccgacgacgacgcgttgcgcggcgccggctgcgcgccggtgctgctgcacacgctgcccagcctgcgcatgcgcgcggatgcgctgatgcagtacctggcactgcgcaaatggcgccgcgccctgctgctgagcggcccgtccgcggccgatgcggcgcagcgcgacgcgctggtggcgtcggcgcggcgctttggcattgcctggtcggcgcagcgcgccttccggctgtccaacgacccgcgtgagcgcgaccaggccaacctcggcctgctgaccggcggcgtggactatgacgtggtggtggtggccgatgccgacggcgagttcgcccgcggcgtgccctacgccacgctgctgccgcgcccggtggtgggcgccggcgggctgggcgcgcaggcgtggcactgggcctgggagcgcaatggcgggccgcagctcaaccggcgcttcatgcgcgcggcgggccgtccgatgaccggctacgactgggctgcctgggtggcggtcaaggccattgccgagagcgtggcgcgcctgcccggggccgggtttgccggacaggcgcaggcgcttgccgccgggcaggtggtggtggacggcttcaaggggccgccgctgtcgttccgccgctgggaccgccagctgcgccagccggtgttgctggcccaccccgacggcgtggccggcatggccccggtggaaggcgtgttgcatccgaagaacaacctcgacaccctgggcgccgatgaagccgacacggcgtgccgggccccatccgcgtagcgcacccatggcctccatcctgatccatcgctggcgcgcgctgcgcgcggtttgcgggcgcgagctgcgcaagtacctgcgccagcccgggcgcctgctgtcgtcgctggtgcgcccgctgctgtggctgctggtgtttgccgcgggcttccagaacgcgctgggcgtcgccattgcgccgccctacgacacctacatcgaatacaaggtctacgtggcgcccggactgctgggcatgatcgcgctgttcaacggcatgcagtcgtcgctggccatggtgtacgaccgcgagatgggcgtgatgcggctgctgctgaccgcgccgctgccgcggggctggctgctggcttgcaagctggcggcgggtacggtgctgtcgctgctgcagatggccgcgttcctgctggtggcgatggccttcggcatccgcttcgagtccctgcacctgctggcggcgacgggcgccatggcgctggccgcgctgatgctgggtgcgctgggcctgctgctgtcggttcatgtgcgccagctcgagaactttgccggcaccatgaacttcgtgatcttcccgatgttcttcatcagctcggcgctgtatccactgtggaagctgcaggagtcgggcgcggagctggtgtaccagctggcccgcttcaatccgttcacccacgcggtcgaggcgatccgctttgcgctgtacgggcaggtggcgccgctgagcctggcggtggtggcgggcagcgcggtggtgttcttcgcgctggcgctgcagggctacgacccgcagcgcggcatggcgcgccgggggcagcaggcatgaggcggcggacgtggggcatgctcctgctgatggcggccgcactgggcctggccagtgcggcggtagcggctgccggggcagcgggcgccgtcatcgcgcacagcgatccgctgcagtcgccgcaatgggcctggatccacaaggagctgctgcagtctggcccggtggtgttcgacagccgcgtcagggtgaccgggccggcgtttgcggaagaccccatgcgcgtgccgatcgccttcgatgcctcggcgctgggcgaagtggatcgcatcgtggtggcggtcgaccgcaacccgatccgcgaggtgctggcgttcgaaccgctgcgggtgcgcccgtcgctgtcgttccgcttcaagctggaacaggcttcgccggtgcgggtggcggcgcgcacgcgcgatggcacctggcatgtcggcagcgtgctggtcaatgccggcggcgggggctgtacggtgcccggcgccacccgccgcgacggcagctggagccgcacgctcaatcgcgtggacgcgcgcgtgttcccgggcttcggcggggccgcggcacgcgtgcggctgcgcgtgatgcatccgatggataccggactggcagcgggcatcccggcgttccacatcgagaccctggttcttgccgacgcggcccggcagccgctgctgcgcctgacgctgcatgagccggttgccgagaatccgatcttctccttcgacctgcgcgatgccgtgccgccgggcatgacggtggccggccacgacaacaacggcaaccgcatcgcggcgcgggtgtcaccatgaagcggcgattgctactgtggttgctgctatgcctggcgggccagcccgtgccgccggcattcgcccagcaggctgcgctgcagcctcctgactatcgcctggccccgcgcgagatcgccgcgggcgtgtggctgctggaaggcgccaatgccgacttcgcgcccggcaacggctgcaacatcatcaatacggcgttcatcgacaccggcgacggcatagtggttatcaacaccggcccgtcgcggctgtatggcgagcagcagcgcaaggcgattgcatcggtcacggccgccccggtgcggctggtgctgaacctgaacctgcatcccgactatttcttcggcaaccaggcctatgccgatgtgggcggcagcgccctggccggcaccatcgacggggcgcggcgcgagggcgccgcttatgccgacaacctctaccgcctgtgcggcgactggatgcgcggcaccgagcccgtgccggctgcgcacgcgctggcgccgggccggctcacgatcgggcgccatacgctggagatggtgcgcctggacggccataccggcgacgacctggtggtgctggaccacagcgcgggcgtggtctttgccggcgggctggtgttccggcaacgcattccgaccacgccgcacgcggatatcggccgctggctggccagcctgggccggctgcaggcgctgctggccgacagcggggcgcgcgtgctggtccccagccacgggccagtgcctgcggccggcggcggcgctgaggccatcgcgcagacgcgcggctacctgcaatggctggacacgcgcctgcgcgaggccgcggcgcaggggcgggacctggccgaggtcatggcgatgccggtgccgcagccctacgcgcactgggccgcgatgcccgcggagtacctgcgcaacgtcggccatctctaccctgcgcgtgaggaagccgcgcttggccactgacgctggccagccgaggcgggctgttcagttctggagcaactgcaacgcagtgttgcgcgctggcacggccgtcatcacgcaaccgggccgcaaccggcgtgctggtgcggggatgcgactggcatgggaattgccaaaggcgtgtctggtgggtggcgcagtggcgcacctgggaaacccaaaacaagagaggagatggcaatgaggacgttacgagtagtgatggcggttgcggctgccgcggccagtctggccgcgcaggcggctgtgaccgatgccatgatcgagaacgacgcaaagagccccggcgatgtgttgtcgtggggcatgggcccgcaaggccagcgctattccacgctgtcgcgcatcaatacgaagaacgtcgggcagctggtgccggcgtggtcgttctcgtttggcggcgagaagcagcgcgggcaggaatcgcagccgctgatccatgacggcaagatgttcgtgacggcctcgtattcgcgcatctatgcgctggacctgaagaccgggcgcaagctctggaagtatgagcaccggctgcccgaaggcatcatgccgtgctgcgacgtggtgaaccgcggtgcggcactctacgacaacctggtgatcttcggcacgctcgatgcgcagctggtggcgctggaccagaagaccggcaaggtggtgtggaaggagaagctggaggactacgccgccggctattcgtacacggcggcgcccatgatcgtcaagggcatggtgctgaccggcatctcgggcggcgagttcggcgtggtgggccgggtcgacgcacgcgatgccaagaccgggcagctggtgtggtcgcggccggtggtcgaaggccatatgggctacaagtacgacaaggacggcaacaagaccgagaacggcgtgaccggcaccgccaacgcaagctggccgggcgagacctggaagaccggcggcgccgccacctggctgggcggcacctacgatccggccaccgggctggtgtacttcggcaccggcaatccggggccgtggaacagccatatccgcaagggcgacaacctctactcggcctcgacggtggcgctggatcccgccaccggcaagatcgcctggcactaccagaacaccccgaacgacggctgggatttcgatggcgtcaatgagttcgtgaccttcgacctggacggcaagcgcatgggcggcaaggccgaccgcaatggcttcttctacgtcaacgacgcggccagcggcaagctggtcaacgccttccccttcgtcaggaagatcacctgggccaccggcatcgacctgaagagcggccgccccaactacatcgccgaaggccgccccggcgaccccgccgccggcagcgacgagaagaagggcaagtccgtgtttgccgcgccgggcttccttggcggcaagaaccagcagccgatggcctacagcccgcagaccggcctgttctacgtgcccgccaacgagtggggcatggatatctggaacgagcccatcagctacaagaagggcgctgccttcctgggcgcgggtttcaccatccgtccgctgaacgaggactatatcggcacgctgcgggccatcaaccccaagagcggcaagatcatgtgggaggtcaagaacagcgcgccgctgtggggcggggtgatgaccaccgccggcgggctggtgttctggggcacgccggaaggctacctgaaggcggccgacgccaggaccggcaaggagctgtggcagttccagaccggcagcggcgtggtggcgcccccggtcacctgggaagagaacggcgagcagtacgtggcggtggtgtccggctggggcggcgcggtgccgctgtggggcggcgaggtggccaagcgcgtgaacttcctggagcagggcggctcggtgtgggtgttcaagctgcacaagagctgagctggcgggagatgacactgccaggcgcccgcatcgcatcatgggtgcgatgcgggcgccgggcgcgggtgcaacaggatgaaacgggactcaggtatgaagaaggaatggatggcgctggcggtggcttcggcgctgctgccgggcgcggcgctggccggcacggccgccgacatgcaggccctggccgacaagagcggctgcttttcctgccatggcatgcagtcaaagctggtgggcccggggtttgccgaggtggctgccaagtacaagggcgacagccaggcggcggagcggctggcaaagaagatccgcgaaggcggcaagggcgcgtgggggcggattccgatgccgccgcatggcagccttgctgaggacgatgcgaagaaactggcggagtgggtgttgagtgccagctgaggccggcgactgtcttgacgatgccggcatgccggcaaggaaccccggctggcgcctgccatgccggggtttttcctttcttagcgctggccgctgctcagccgcagcgagttgccatcgctgcgaaataccatcgcttgctcgcgtgcctgcgccacggccagccggccctgcagcacgatctcgctgaccttgtcgtgcgcgccggagcgctcgcacaccgggtccgtggcggtggcgtcgccggtgaccaggaacgcctggcagcggcagccgccgtagtcctgctcgcgctggtcgcaggaacggcagggttcctgcatccactgcgtgccgcggaaacggcggaaggcatcgctttcggtccagatctcgcgcagcccctgcgtggcgacattgggcagcgccaggcccggcagcatgcgcgccgcgtggcagggcagcgcggtgccgtccggcgccacgccaaggaaggtggtgccccagccgttcatgcacttcttgggccgcgcctcgaagtaatcaggcacgacgaacaggatctggcattgcctgccgatgcgcgcgcggtactgccggaccacggcctcggcctcgcgcagctgctcatgggtgggcagcagcgccagccggttctcccaggcccagccgtagtactgcgtgttggccagttccaggtattcggcgcccatctgcagggccatctcgatgatggtgccgacatgcggcaggttatgccggtgcagcacgcagttcatcaccatcggatagccgtgcgccttgatcatgcgcgccacgcgctgcttcaggtcgaaggtgcgggtgctggacaggaagtcgttgagctcgcgggtggagtcctggaacgacagctggatatggtccaggccggcgtcgcgcagggcggcaaggcgggcgtcggtcaggcccacgcccgaggtgatgaggttggtgtagaagcccaggccatgcgcatgcctgaccagtacttcaaggtccttgcgcagcagtggttcgccgccggacagcccgagctgcaccgcgcccagcgcccgcgcctggctgaacacgtcgcaccattgcacggtgctcagctcggccgtatgccgggcatagtccaccgggttggagcagaaggcgcaatgcagcgggcagcggtaggtcagctcggccagcagccacagcggcgggccgggcgcggcctcagaccagccagccgcgttcgatcgcatgtttgacaaaggcatgtacctccggggcgattccctgcacgccaaacgcggcctgcaggtcgtcgatcagcatgtccagcgtgtggctgccgtcgcagcgctgcaggatcgcggcggcgctgtcgttgagggtgaccatgccttccgggtacagcagcacccagctttgctgggaggcttcccattgcaggcgaaaggtccggtgcagggtcggtctggcgaggtcttgcgtgctggctgtcatgggttggcttgctggatggcgtcgagcatcgaccagagcacgtcgagcttgaactgcaggatgtcgagggcgcgctgctgttgcgccgcgctgcggaaatggcccagcgtcacgcgcaggccatggtccacgtcgcgctgcgcgagcggaatgcgagagcggaagtagtccagcccggcggcctcgatccacgggtaatgcgtgggccagccggccaggcgttccttgtggattgcgggcgcgaacatctccgtcagcgacgagcacacggcttcctgccacggtgcgcggcgcgcaaagttgacgtaggcatcgacggcaaagcgcaccccgggcagcacgtgccggtggctcagcagtgcttcgcgctccaggcccaccgcctggcccaggcgcagccaggcctcgatgccgccgggctgggtgtcggtgccgtcgtggtcaaggatgcgcaccacccactcgcggcgggtgtcgcgctcggggcaattggacaggatggcggcgtccttcagcgggatgttgtcctgatagtagaagcggttggccacccatgcgcggatctgcgcgggcgaacactggcctgccgccatgcgctggttgaagggatggtggatgtggtagccgctttccatggcgcgcaggcgggcctcgaactcggcctcggtccaggcgatgggggggatggggaggatggcagttgtcatagggcgatttccatgccgtcgtacgccacctcgatgccatgccgcgccagctctgcgcgctcgggcgagtcttccaccagcaccgggttggtattgttgatatggataagaatcttgcggctggcgggcagccgctccaggacctcgatcatgccgccgggtcccgacagggccaggtggcccatgtcggcggcgctcttgcccgagaagccaggcgcctgcatctcgtcgtcgcgccagaaggtgccgtcgaccagcacgatgtcggcgctgtgcagctcggcaaagacgtggtcgtcgatgcggcccaggccgggcgcatagaaggcgctgcggccgctgcggcggtcttcgatgcgcaggccgatgttgtcgcccgcgcgcggcgcgtggcggttgggcgagtagggcggggccttgctctccagcggtatcgccgtcagtgtcaggccgtccagcggcgggactgaaaacgcggtgccgtcgcagggcagggcatgcgtccgcagtccgcagtagtgcgacaggatgcgcgtcagcgggaaggcggcgcccaggtcgtccagcacggcggcggtggcatagagcggcagcgcctcgcggtgttcgcgcagcatcagcaggccggtgacgtggtcgatctgcgcatccatcagcacgaccgcggcgatggcggtgtcgcgcggcgcgcgcgcgggctgcagcgcgggtgcctggcgcagctgctgcaggatatcgggcgaggcattgaccaggatggcatcaggcccgtcgcccgtcagcgcgatcgaggattgcgtgcgcggcgtggcgcgcaccgtgccgcggcgcacgccgtcgcagttgtggcagttgcagttccactgcggaaagccgccgccggcggccgaccccagtacccggatgcttgtcatggcgtgagcgcttggtgttgggtcatgcttcacggggcaggcgccaggcctggcgtctgcctgcgttggttgtgcttgcggtccgcggcttgcctgtcggcgcagcgccggtcgcaggcgccgcggcaccgcggcaccctcagcggttggcgatgtacatcgtgatttcaaagccaagccgcagctcggtgtaggcgggggtggtccagcgcatgtctctctccttgggtggcatggttagtgaatatcgttgtgcagcggcgcctggctgccgcccgactgccgcatcccttcaaggcaacatccatgcccgacgcatcaacgatttctgccggcttttccgacgcggccaccaccttccacctgcgtacgcccgatgcccagcgcgtgcatgtgcggctggccggcgccgcggacggcgagccgtggctggtgctgcatggcgggccgggcagcggctgctctgccgccatggcgcagtggttcgacccgcggcggcaccgcgtggtgatgccggaccagcgcggcgccggccgctccaggccggccggctgcctgcgccgcaataccgtgggcgcgctgctggccgacctggagcagctgcgccgcgcgctgggcatcgagcgctggggcgtggtgggcggatcatggggtgcagcacttgccctggcgtacgcggcgcaatgcccgcacgccgtggcggcgctggtcctgcgcggctccttcctgaccggccgcgacgatgtgctcgcgctgttttcaccgcgccatgggggccgccgcatgctgcattgcgtcaaggcatggggcgagcgcttgcccgatgcgcgcgcgcggctgctcactgtgtcacggctgttgcaaagtggtacgcctgttcaaaaacgggacactgccgcggcgtggcaggcgagcgaacaggcgtggttgggtctttcccctgcgtcgcattcgcgccggcagcggcggcctgagcgcatggccgcggtgaacaaataccggatccaggcgcactacctgcgcaaccgggccggactgggcaagccggccctgctcagcgcggcgcgggtcatcggcgcgcatggcctgccggtgacgctgctgcatggccgcgccgacaaggtctgccgtcccgccaacgcgctgcgcctgcaggccgccatgccgggcgcaaggctggcctgggtggacggcggacacctggcggcaggggccatgcgcgacgccctggtggccgcgatccgcgccgcgggctggcagcggtgatgcccacgacgcggcgcggctttcttggcgccacgcttgcgctggccatgaacggctggcgcccggcggccgctgccggcacgcgggtcacgctggagcggctgcagccaggcgtgtacgtggcccgcgccggcaatgccgaagtggcgcgcgccaacgccgccgaagtggtgccgaccctggtccacctgagcggtgcgggcgtgctggtggtggaccccgggccgcaggcggcgtggggcggtgcgctgctcggcgccatccgggcgctgacgccgcagcccgtgcgttgggtggtcaacacgcatgcccacccggagaacgtgctggccaatgccgcgttcgcacggctgcggccccggcccgtgttcctggcctccgccgccacggctgcgctgatgcggcaacgctgcgcggcctgcctggcccgcatggcgacgctgctcggcagcggtaccatgcgcggcgccgcgatagtcttgccggagcccgcgctgcagcccgatggctggctgcacaccggcgctaccgcctggcaggtgcaggtttatgcgaatgcgcacagtgcctcggatacggtgctgtacgcgccgcggctgcagctgctgtgtgcgggtggcctggcttaccgcgagcgcgtgccggagatgcacgaggcctcgctgcaggggtggcgccgtgcgctgcggcggctgcaggagctgccggcgcgcacggtggtgggcaccgcggcgggcacgcccgcccagacgctggcgccgacgctggcttacctggatgcgctggcgcacggaatcggcgccgcgctggccgcgggcagcgatgcctcgcgcgccaatgacgccgtggcggcggtgccgttccggcactggcgccatttccagtcgcgccacccgctgaacgtgcagcgcgcctggcgcgagctggaagacctgtggatgcagggcgagccgctggcctgagcgcggggctgccctggtgcgtggcccgaatcagccggcctggtggggcagcccgcgggcctcttccattttccggtagaccgtattgcgcgagatccccagcgccttggccgccgcagagatgttcccgttgtgcgccttgaccgtggcgacaatggccatggcctcgacatcggccagccgcgtgggctgcgcgcccggcaacatatgggccgcgggcaccgccgcatgcccctggcgctcgcgcaggtcatcgaggaagtcgtcgggcaggtggtcctcggtgatctcagcttcgccttcggccatcagccgcgcggtgcgcagcaggttgcacagctggcggatattgcccggccagtggtagcggcggaacatctccatcaccgactcgcggatgcggggcggctcgccgggttgcacgcccgcctggtcctggcgcagcagcctggcggccaccgcgtcgaggtcgccgcgctcgcgcagggccggcagccgcaccaccagcccgttgaggcggtagtagaggtcttcgcggaactggccgttggcgaccaggtcacgcaggttgcggttggtggcgcataccaccgagacgtcgacatggatgaccttgctgctgcccagcggcgacaccgcgcgttcctgcagcgcgcgcagcagccgtccttgcagatgcagcggcatgtccccgatctcgtccaggaacagcgtgccgccgttggccagcagcatcttgccgatgccgcccttcttgcgggcgccggtgaaggcgccttcttcatagccgaacagctcggactcgatcagggtttccgggatggaggcgcagttcacggcaatgaagggcccggcatggcgcgggctgtcggcgtggatggcgcgcgccatcagttccttgccggtaccggtctcgcccagcaccatcaccggaatatccttgccgatgaccttgcgcagcttgccgatgaccgcgcggatctgcgcgtcgcccgtgtccaggtcgtccagcccgggtgagcgggcggggcctgcggccaggctgcgcggtgcggcggccgtgccaggctggactgcttggccggcatcggtgttgcccggcagcgatgcggcgggtgacttccattcgacccgggcgctgaccttgacgccgctcggcaggtgcagctggacgatgcccgcatgagccgcgcgcaccgcgtcgaacagctgcgacatcgacagcccgaacagcgaggagaaggtgtgcgcatgcagggcgccattggacaggccaagctggaactgcccgctgcggttggctgacaggaagcgcccgccgggcgtgaaggagacgatgccctcgaccagcgtgcccaggaactccgcgcgcgaatggaagcggatgcacaccatgtcacggaaggcgttgccgaacagctggttctcgatcatctgcgccgacatccgcaccagcgccatggtgtgcttgtggaaaccgcgctggtcgccggtcacatccagcgcccccacggtcttgccgtaagggtcgaggatggtcatgcacgagcaggtcaggaactggttggcctccaggaagtggtcggcgccgtgtaccagcgtggcccggttctcggccagggccgtgccgatggcgttggtgccgcggcgcgcttccgaccactccgcgcccgggcgcagcgcgacctggttggcccgggccagaaagtcgtcatcgcccatcgagtgcaggatcaggccatcggcgtcggtcaggatgaccatgctctgcgtattcacgatctggtcgtagagcgtttccatcaccggcagcgcataggcgaacagcgactggctacgctcgatccgcgttttcagctcgctctgcagcaccgggcagaagtcgggcgattcatagggacgcaggccataggactcggaacgctggtgggcctgggcaatcagttggtcgcgctcgggctgccctgtgtcacccggggcgcccgccgcggggcgggccggttccggctggaaggtcatttctctgtctcctgtggaaagtccgcccgcggtctttgcgcgggtcgctgtcggcgccttcgccgggcgcatggtcgacagtgttgcgtcatgaagcaaaacacttgccagggtgtggcaatccgggacacccgtgccgcgatgctgcgtttcagacaacgatggcggcgcggcgaagcctgctttcaggcgcctccgggcctggtccggctggctggtatggctcttgcggaaacagggcaaacaaccaagacccgtccactgtaggagacatccatgaaaacgcagcgccgcctgcttgccttgctcgcgctttgcgcgtccctgaccgccctcccggccggctccgtgctggcccatggcgacgtcacgccccaggccgtcgataccaaagcgttaccacaactgggcgacgaatggcgcccggacaatccctaccgtagcggtgatgcgcacaaggaggctctgcggatcggcagctcggcctataaccagaactgcgcgcgctgccatggcctggaagcggtgtcagggggcatcgcgccggacctgcgcaagctggacggcgactgcgtctcgctggcggatgcaaagaagaagcaggcatgcatgagcgagatctcgcagttctacaccaccaccgtgcgcaagggccgcacgcgcgacggccgcgtctacatgccgccgttcgacggcgtgctgagccaggaggcggtgtgggccatcaagacctacctggagtcgcgccacgagtaagaggcggttgcgccggcagtccttcacgttgtccagccccggcccgcagtgccgggtcaacgcatcttccaggagccatcccatgcccgccagccctgtccgcggccccaggcattccgtgtcccccatgccggcggcgccggccggcgccgtgcgctggctgtgcggcgccatgctggctgccgccgcgctcttctgcgcgcaaccggcccaggccgacctggccaggatccgccagaccggcaccctcaaggtggcggtctacaaaggcttgccgccgttctccgcgatcgcgggcagtcaggccgcgggcatcgacgtggccctggccagggcactgggcaaggagctgggcctgtcggtggcgctgatgccgttcgatgccgatgaaagcatggctgacgacttgcgtgccatggtctggcgcggccattaccttggttacggaccggccgacgtaatgctgcacgtgccggtcgaccgcgccttcatgcgcgagaacgacaaggcgctgatcttcgcgccgtactaccgcgagaccttcgtgctggtgcaggaccgcgagcgcgtgccggcggtgcgcggcctggaagacctggccgggcagccgaccggcgccgcagccggttcggccggggccaatgcgctgctgtccggcgcgggcggcgccttgcgcgacaaggtcaggatctaccccgaagccgacgcggcattgcgcgcgctgttctccggcgagatcgcggcggcgatggtgacgcgcgcccaatacgagagcgcgctcaaggccgcggggcaatccggggcgcgctttgccgcgacggaacccagcgcgccgctgctgccgcagcgcgggtgggccgtcggcatggcggtcaaggcaggcgagcgggaactggccgaagcgctggaaaaggcgttgagcgcgctgcgcagcaatggcgaactggcgcgcatctttgccggctacggggtgtcgatgcaggcgccgtgagggtggctggcgggcgcctcacctggccggcctggcggcccgtgcaagcggcagcgtctgcaggcgctcggcaacgatattgcggatcgcctgcggcgcgtccaggtcgtccagcatgcgcggccagttggcatgcgccagcgcgacggcttccttgacggcggcggtcgcaatgcgccgcgggacgccggccttctccgcgatggtctcgtacgttgccagggtttcttcacgctgccgcctgtcgatggcaacgttctggccataggtcgcaaagccgggaagcgcggccacgcagacgatgtcgtacgccggtgacagttctggcaggaccccgttgtgataggtcaccgagaagttcttcaggtgcgcatcgctgttgccgatcagcgtgttgaccgcctggcgcaggaagaactgccgcgcatgctcgaccccgctcgggctcaggcgatacagggcggcaacgagctgaatgtagctctcgatgccggcgtacttcttcgctggcatcctgcccagcatctggcagccgtcttcggcgtgcacacgcccggccggggtgcggtcaaacctgtccaccgcaaggtagtgcaggttttcgcccagcgattcaaccagtccctcgacctcgatggtcgagacgggcagtactcttgtcggcgcgacatggacgccggcggcagccgcgagctgcatcgagatcgattcgttgaacacctgcgaatcatcgttcctggcaggaagcttggcgatgatgtcggacagcctgcccttggctggcagagtgtagcgcttgtcctgcagcaccgtcgacagggccagcttgttctgcacgccggacaccgaggccgcgccctgggtggcgccctccaccacggcaatttccaggttgtccgcgccgccggtcacgccatacgtccgcgcatactccggcaacgcgccgatgtccgccggcacgatgacgacggcccccgggagatcattgccggccgatgccaggatgccgaaatcatccttgtcatcgggattgctccgcgttgcctcgagccgcttgcgcagttcgccctcgggcagcaggccggcaaagtagggcggcagttcatggcccgtgctgtagacggcaggatggaaggggttgtccagcacctcggcggtggccttgcggccggcctcggtcgggacgctgatcgacaggctcagcgtggggcggcgcgtgtcgccccggaaggcttcggatggcacgaaccggacattgccgctggcctcgcacaggtagccgcataactggtcgtacagccggacctcaagaaagcgcggatgcagttcgtagctcattcctggtccaggaagatgtcgactgcgctgcgggcgctgcggtcgggcccgctgcctttgccttccaggacttgcctgacttcctgtgcccgctcgttgggcaccaggacccattctgcgtccagggcggccgccagggcttcgagggtggatgcgcggctgtccttcttccccagcaggatcgccgacaggttctggcttgccatgcccagcacccgcccgatctcggtcagggtcttgcctctggcttcacgcatgtcgcggcactgagaaactaatgacatagcattatttcattgatatatgcatgccttagtatgatacatcggcgcgccgatagccaggcgcgtatcattcgatagtagcctctattcaataaagtaatgctatcgaattattttctattgcggaccgccgtccggaatgaaaccgggtggagcaaatgaagacgggccgccgcccgcccgtctcacttccccggtgtcccccaggccaccccttgccgctaccccttgcgctggcacccgatactgtataaatatacagttatcgtaaatctactagttcctcgccatccccggcgagcgacgccaactccacatgactgcgcaatcgcacgcagccccgcccatggcggcggagggccttcttttccctgcgccggcgcccccggtctcgcgccagcaggcgctgtcggcgctcgagcagcgttatcccgggctgtggcgggccggccagctgggccgtgccggcggtgcggcggtatgcccgaccggatatgacgcgctgtcggccgagctgcccggcggcggctggccggcgggcgggctgacggagctgctgacggcgcagggtggagcgggcgagctgcgcctgctgctgccggcgctgggcgcgctggccggggccgggcgccgtattgcgctggtggcgccgccttacctgcccaatgcgatggggctggccgcggccggcctgccggcgcgccagctctactggatgcgtcccccggccggcgccggcaaggccgcgcagcaggccgacatgctgtgggcggccgagcaggtgctgcgcagccaggcctttggcggcgtgctggtctggctgcccgcggcccgccccgaggcgctgcgccgcctgcaggtgctggcgcaggccggcgacgcggtggcatgggcgctgcgcccggccacggcgctgcgcgagtcgtcgccggcggtgctgcggctgctgctggcgccgctgcccggcaatgtgctgtcgatcaccttccacaagcggcgcgggccggtgcgggacacgccgctgctgctgcgcctggacgggatggcagcggccacgcgcgcagccgcctggcctgtcccggcaggagcacctgccttgtctgaatcgtcttctccatcttcttccgatgccgtactggatcgcggtgcacctgccgcgcctgcccctggacgccctgcagcccagctggcctgagctggcgcccgccgtgagcccgcctgccgccaccgccacgctgcaccatgcgctgccggtggcggtgatggcgcgcgagcaggtggtgctggccaacggcccggcgatgcagctcggcgtgcgctacggcatgcgccgcggcggcgtgcaggcgctgtcggccgacatcgtgcagctggagcgcgacctggccgcggaagcttcgttgatggaggcggtggcgctggcgctgctgcatttcacgccgggcgtgaccgtcgacgaggaaccggagtcggccacggtgatgctggacgtcaccgccagcctgcgcctgtttggcggccaccgcgcgctgtgccgcgcggtgcgtgcctgcgtgcgccagcttggcacctttgcccaggtgggctcaggcccgaccgcgcacggcgccgcgtggctggcgcgccagccgctgcggcgcacgcggcgcggcgtggtgcggcccgggcgccgcgcggtgggcatggcacgcctgcaccggctgctggaccgcctgccggtggaggcgctgcatgcgctggccgatccggcctggctggacggcatcggctgccgcacgctgggcgaggtgcggcgcctgccgcgcgcgggcctgacgcgccggctgggcccggcgctgctggcgcggctggaccaggcttatggcgacacgccggcgcgctttgcctggtttgtggcgccgcccgcgtttgcgcagcgcatggacctgccgggccgcatcgaatccgccgagggcgtgctggccggcgcgcagcgcctgctgctggcgctggcgggctggctggcggtgcagcaggccggcgtcacgcgctgcgtgctggtgctggagcatgagcgctaccggcgcggcgttgacaccgacggcaccgaggtgccggtgggcctggcccagcccagccgcgaccccgcgcacctgtcgcggctgctgcgcgagaagctcgacaagctcaatttccacgccccggtgaccggcctggcgctgcgcgttgaggcgatggccgcatgcgtgccgcacagcgatgcgctgttccccgagcccggcggcacgccggaagacctgggccgcctgctcgatacgctgatggcgcggctgggccgtgacaacgtgctgcagccgcggccgctggccgaccaccggcccgagcgcgccaaccgctggtgcccggtcgacgagcccggcggcaacaaggccgccagcctgccggatccgcagccggagcgcccgctgtggctgctgccgcaaccgctgccgctgccggtgcagcgccaccggccctgccacggcggcccgctggcgctgctgagccgccctgagcgcatcgaggccggctggtgggacggcgcgctggccacgcgcgactactttatcgccgagcgcgccgacggcctgcgctgctggatcttccgcgaacgtccgggccatgcggcgcaggacgatggcggcgagtaccgctggttcctgcacgggttgttcgcatgagcgcgctgttcttgcctgcctcgctgccgggtttgctgccggcgctgccggattacgtggagctgcactgcatctccaacttcaccttcctgaccggcgcctcgcacccgggcgagctgatcgagcgcgccttcggcctgggctacagcgggctggcgctgaccgatgaatgctcggtggccggcaccgcgcgcgcgcacgatgccatcgagacgctgcgcaagcgcctgcacgatgcagtggcgcgcagcgcggcacgcggcgaagagggcgtggatgagccgctgctggaccatgacgaagagcctgacgccggcgctgacgatccccatgcccacgccagccgccaccagcggctgcaggcgctggcccgcgccgccgatgccttctcgctgctgatcggcagccgcttcagcctgaccccggccgatggctcggcgcgcccgccgctgcggctggtgctgatcgcgcagcaccgcgagggcttcggcaacctgagcgagctgatcacgctgggccggcggcgcgcgcagaagggcagctaccggctgcatcccgaagacctggccgcgcccgctgctgatgaagcgcacctgcgcggcgtgcccggctgcgtggcgctgctgctgcccgactattgcgccgatcctgaactgctgcgagagcaggccgagtggtgccgcgcggtcttcggcgagcgcgcctggatcgcgctggagcagttgcagggccatgccgatgcactgcatcgcgcgcgcctggaagcggtatcggcacagaccggcgtgccgctggcggcggccggcgcggtcaccatgcacgtgcgctcgcgcaagccgctgtccgatgtgctggccgcgatccggctgggccagccgctggccgaatgcggcatggcgctggcgcccaatgccgagcagcacctgcgcatgcgccaggtgctgtcgcgcctgtacccgcgcgaggcgctggcgcagacgctgaagatcgcagagtcgtgcgatttctcgctggggatgctgcgctatgaatatcccgaggaactggtgccggccggcgagacgccgatctcctacctgcgcaaggaggtcacgcgcggcaagcgtgaacgcttccccaacggcctgaagccggagtgggagaaacagctcgaagaagaactgcagttgatcgaagaaaagcactacgaacccttcttcctgaccgtgcacgacatcgtgcgctttgcgcgcggggagggcatcctgtgccagggccgcggctcggccgccaattcactggtgtgcttctgcctgtatgtgaccgaggtcagtcccgagcaggccaacctgctgttcggccgcttcctgtcgcgcgagcgcgatgagccgcccgatatcgacgtggacttcgagcaccagcggcgcgaagaggtgatccagtacatctacaggaaatacggccgccaccgcgcagcgctggcggcgtcgctgatcacctaccgctcgcgcagcgcattgcgcgacgtgggccgcgcgctgggcatcgacgccagcgtggtggagcaggtggtcaagggccaggcctggtgggacggcggccgcggctttgtcgagaagatcgcccgctacgggctcgatcccgaatcgccggcggtgcagcagtgggccagcctgaccgcgcagctgcgcggctttccgcgccacctgtcgcagcatgtgggcggtttcgtgatcgcgcagcacaagctgtcgcggctggtgccgatcgagaacgcggccatggccgaccgcagcgtgatccagtgggacaaggacgacctggagtcgctgggcctgctcaaggtcgatgtgctggcgctgggcatgctgtcggcgatccggcgcgcgctggagatgatccccaacccggacccggcgcgcgccgcattgccgacgcggatggaagacatccccaaggaagacccggacacctacaacatgatctgcaaggccgagaccatcggcgtattccagatcgaatcgcgcgcgcagcaatcgatgctgccgcggctgcagccgcgccagtactacgacctggtggtggaggtcgccatcgtgcggcccggcccgatccagggcggcatggtgcatccctacctgaagcggcgcgaggccttccgccgcaccggcaagccgcccacttacttcaacccggtcatcgaaaaggtattgggccgcacgctgggtgtgcccatcttccaggagcaggtgatgcagttggccatcgacgcggccggcttttcaccgggacaggccgaccagctgcgccggtcgatggcggcgtggcggcggcgcggcgacctgcgccagcaccaggatgcgctggtgcgcgcgctgaccggcaacggctacccggaatccttcgcgctggcgatctgcaagcagatcgaggggtttggcgagtatggcttccccgagagccacgcggccagctttgccaagctggtctatatcagcgcctggctcaagtgccatcatccggccgccttcctgtgcgcgctgctgaacagccagccgatggggttctattcaccgtcgcaactggtgcaggacgccagccgcaatggcgtgcaggtgctgccggtggatgtgaccatcagccgctgggacagcacgctggagccggtggaggccgatgtcgccgacgcgcaggcccgcaccaggccgcagcatccgcgcgtgcgcctgggcctgggccgcgtcaagggcatgcgcgaagcggccgcgctgcgcatcgaggccgcgcgcgcccagcgtccgttcgacagcgtcgaagacctggcactgcgcgccagcctggaccggcacgacatcgacgtgctggccgccgccgacgcactggcgccgctggccggcaaccgccgccaggcccgctggcaggcgcgcgccgccgccgcgcatgccgcgcaccgcgacctgctgtacgaagcgccgcccgccgaagccgcgctggcgctgcccgagccccggctcggcgaagacgtgacggcggactatgccagcctgggcctgtcgctcaagtcgcacccgctggcgttgctgcggcgcaagctgacggcgatgcgctttgccaccgccagccagctcgcgcgctgcgccaacggccgccgcgtgcgcgcctgcggcatcgtcaccgtgcgccagcgcccatccaccgccagcggcaccatcttcgccaccatcgaggacgagaccggctccgtcaacctgatcctgtggcccgacctggtcgagcgccagcgcaaggaggtgctgagcgccacgctgctgggcgtggtcggcacctggcagcgccagggcgacgtgcgccacctggtggccaaggagctggtggatttaagcccgatgctggggcggttgatggtggggagccgggattttcattgagacgcacggccagaagccaggtcatgcctgtgcctggagcggtttacttgcacgcctgattcatcgccaggcaccgctttgttgttcacgcaactgtaacgaagcgcgggtaacgtagcgtccgtccactaccggacaccacagggcgctgcgcccggcccgcgcccccacacctggcgctgccggcgcgtgcgccagccagcctgatcgggctgcccggaattgccttgtctgcaccgtgggcgcgctttgcccgcactcctgaaccgcctcgacaccaccgccatgaaaacccgactgatcgccgcggccttgctggccgccacggcgagccctgccttcgccctgaacatcctgctgaccaacgacgatggcctgaccagcaacctgaaggcgctgtacgacgccctcaagggcgcaggccacaacgtcatcgtcagcgtgccctgcaccggccagagtggccgcggcgccggcatcgtgatgtacagcaccacggtcatcgtgcccgacaacgacaagacccagatcgaggccgaaggcggctgccacaacggtgcggcggccaccggcgagccggcggtgggccccttcacgaagccgggctacaccaacggcgattacaactacgcccatggcacgccggtgatggcgaccatgtacgggctggacgtgctggctccggcgcgctggggcaaggcccccgacctggtgctgtccgggcccaacgaagggcagaacgtcggccgtatcgtcaacagctcgggcaccgtcagcaatgcgcagttcgccgcatcgcgcggtatcccgtccatcgccctgagcgcgggtacggactcggtcgacaatgcgggcctggcaagcccggtgtccggcgtggtggcgcagttgtccatcaagctggtcaacacgctgcgtgccaaggccaacggcggtccgctgctgcccgcagggctggcgctgaacgtcaacttcccgaacgcgccgtcggccgccacgcccttcgcgttctcgcggcacggcaccttcgatgcgtatgcgctgaagttcaacggcacggcgccgtatgggctgggcatcggcgccggcagcggcacgccgaccgccgcacaaggcgaggatgagtccgtcgtctacaagaccaaggtggctgtcaccgccatgcagatcggcttcgaccagcgtcccgcgggccagcaatggctgcgcctgcgcctgggtgaactgttcggccagtgaggcatgtcccgatgaaacgcctcattcccctgttccccctgatggccgcgctggcgctggccggttgcggcggcaacgacgcgcctgacaacaccacgccgcccgccaccgcgagcttgtcggtcacggatctggagcccggcgcgtacgtcgtcagcgttggcgacgccgacagccccacggtcggcaagtactacgctggcgcggacggcagccgctacctggcgctagccggtgccgaagacaaggccaccatcatctaccgccgcgacaagggtggcagctgggtagccgccccgggcgcggacgctgctgccagcgtcaggctgctgcgccaggatcccgtgccggcggcgagcgtggaacccggcagcgtggcaggctcgtacacggtcgtgctgccctcgggcgccagcgcaagcttcacggtcacggcggacggcaagatcgcgcccggcgcttcggggtgccagctctccgggacggtcgccgcgcacgccatgccgaatacgctgagcctgaagcttgccgcgtcggcctgcggcatggtgcccgccagcgccaccggcgtcctggccatcgacaccgactaccagcctgccgccttccgcctcattgcggacgatggcggccgcgtggtcgacttgtgggcgtatcgagactgaccgtcgctgcctggcgcgctagttcatcgccaggctgcccgccaccagtttctgctcggcggagagcttgcggatagcctggttcagggtcgcggtggtgctgttgatggctgcgcccaggccagcgatttcctgttgcagggccgcgatgcggatgcgcttctggtccggggtcccggtggccgcattcttcactgcctccagctcttgcagcttgcgctccagttgcgcgcgcagttcgcgcaggcgcttgatcgcatccttggcctggtcgggcaggccgctgttgtcgacgtcgctgttgtcgcgcaccgcgggcgcctgtccgccaccggccagggcctgccccggtgccgagatatggatctcggtgctggatgcgggccgcgcccggataccggcggtgtcgccggcggtctcgctggcggctacggccggcgtgactgccgggttgtcaatggaaacggctgccgctgcgttcgcggcagtcggctcgatcatcgtcacggtcgtacttctcctggtctgccggcccttggcaacgtgcactacggaatgcgccggttccttgcggatatcggcagtttgtggccgggacttgagcggccgcagggcgagcagggcaacggaaaaacggaccgtcaacgcaagcggttatcatcgtgccgtgccttgccggtttcatccggaacactgaattcactatccactttgcaggtcgattgatgccgattccgtcttgccaccctggcttcgcgccgtaccgtcagtccgtgggcgggcggggcccatggtaaagggtcgccgcggcgcgggcgcggcgccggcccggaaatcgtcgtcgcaggcgtcatcggccagaacggagcccgcgcagaccgccgagccagcgccgccgtcgcccaccacgtcggcgatgctcgcgcgcatccacagcatgcgggactcgctggggccggccgggcagcgcattgccgatttcgtgacccggtatccgcagaccgtgatccatatgtcggtcagcgaagtggccgagcgcaccaatgcgagcgagggcagcgtggtcggcttctgcaagagcctgggcgcgacgggcttccagcaactgaagatcctgctggcgcaggaactggtgcagggggtccagatcatccacgaagacctcgagcccggcgacacctgcccggcggtcatgcgcaagatcttccagagcaacgtccagacgctgcatgacaccagcgccgtgctcgacgtggccgcgatcgagcgcgcggtcgcattgctcagggcggccgaacgcatcgagatctatggcattggcagcgcggcgccgatcgccgaggatgcgcagtaccgcatgctgcgcatcgggctcaacgtgaaggcggtggtggattcgcatatccaggccatcagcgcatcgctcgcgggccccagggttgccacgctgaccatctcgcattcgggcagcacgcatgaaaccgtgacggccacgcggctggcccgggagagcggtgccagcaccatctgcatcaccaatttcggcaagtcgccgatccaggccttcgccgacgtcgtgctgttcacgatggcgcgcgagacccgcttccggaccgaggcgatgaccagccgcctggcgcaactggcgatcatcgatgtgctgatcgcctgcctcgcgctgacggactacgacacctccgttgaaacgctgcggcgtacgttcgacgtcctgtcgctcaagcgatattgagcctcggccggcccgcgccggcatcctgacatattcctgctgcagttgtcgtccagccttgctcccgtcagtgacgggggcgggtgccgtgccacggccagaaaatgaggataattcaaatataaaaacaattgtattgagcaatattcatttggatgtcacatcgggcccctacgcttcgagtcgcgtcagtcccttccccctggccctcgaacataaggagtcctcatgaacaacccgttgtggtctggccgcgccgcgctgctcgcggcgcttttgtccctggcgctcaccgcatgcggtggtggcgaagatggcagcaccctcgctccccaggccgtcaaggcaaccatgcaggcggcaccagccggcgacgcggcagcgtcgaagcagggcatgcactgcgcaccctgacacacccgcgacccttcctctatcgtccgctcctaccattcccccgatcatgaccaaaatcgatcgacgcaccttcctctccggcgccgtcagaagcgctgccgctgcttcggttctgtcgatgctgccgcccagcatcgcgcgcgcactcgccgttcccgctgcggtcaataccggcacgatccaggacgtgcagcacgtggtgatcctgatgcaggaaaaccgcgccctggaccattacttcggcgccatgcgcggcgtgcgtggcttcggcgaccgcttcccggtgccggtgccgtcaggcaagccggtgtggttcgaatcgaacggcgcgcgcgagatcacgccgttccacctcgacagcgcgaccgtcaacgcgctgcgcgtctccggcacgccgcacagcttcatggatgcgcagaatgcgtggaaccagggccgtttcggcttctgggccaagtacaagaacgaccattcgatgggctactaccgtcgtgaagacattccgttccagtacgcgctggccgaggccttcacgctttgcgacgcctaccactgcagccacgccggcggcaccgacccgaaccgcatcactttcatgtcgggctccaactacaaccccgcgctgcgcgaggcggggcgcaactgcacgcttgacgatgcggaggtcaataacctgcgctgcagcgtgagcggcaagctgcccacgccgggctacacctacaagggttccgccttccagtgggccacgctgccggaactgctgcaggcaaagggcgtgagctggcgcatctaccagaaccccaacgccaactggggcggcctgctgcatggcgggctcgccttcaagagcttccgtgaagcgcagccgggcaatccgctctatgacaacggcatgagcagctggaccatcgagcagctggccgcgcatgtgcgggacgacacgctgccggccgtgagctggatcctgccgacgccggcgcagtccgaacatccgggcggcccgtcgagcgcaaccgaaggcgcggacttcatcaacacggtgctgacggcgctgaccgccaacccggaggtctggagcaagaccgtgttcttcatcaccttcgatgagaatgacggcttcttcgaccatatgccgccggccgcggtgccgtcctacgacgccaatggcgtcctgcacggcaagtcgaccgtcgacgtcaccggcgaatacttcgacaccgccggcaatacggcgctcgacggcaccaccaccagcggcgagaccatccgcctgcgcccgtacgggctcggcccgcgcgtgccgatgtatgtgatctcgccgtggacgcgcggcggctggatcaactcgcaggtgttcgaccacacctcgatggggcgcttcctggaacagcgcttcggcatcacggtgcccgcgatcagcccgtggcaccgcgcggtggccggcgacctgacttcggtcttcgatttcaggacgccgaatgaccaggtgtttccgacgctgccggataccagcaactacaagcaggtgatcgcggaacagctggcgaaacccaaggcggcggcaccggccgtgtcggcgtcgctgttccaggagactggcaccaagtattcgcgcgcgctgccctatgtcctccatgcgagtgcgctggccgagcccaccatcggcaagctgaagctgatcttcagcaatacgggggagcagggcgcggtcttccatgtctacgaccggctccatctggaccagattccgcgccgctacacggtcgagcccggcaagatgctggacgatgaatgggatgcgcgcgccacggacaacggacgctatgacctggcggtctacgggcctaacggcttcgtgcgcatgttcaagggccagttgcccgcggacgccatggccgatgcccctgaggtccgcgtctgctacgacctgggcaagggcagcgtctacctgtcggcgcgcaacgacggcaagggcgcagtcaacggtggcggcaagccgctgacgctggtggtgacgcccaatgcttatcgtaacgacggtccgtggcaactccatatcacggccggcgccgaggtggagcaccactggccgctgcaggagagcggcaactggtacgacttcacggtcacggaagccgaaagcggattcgaacgccgcttcgccggtcgcctggagaccggccagcatggcgtgacggacccggcgatggcaaccgggctgggctgagtgtctggtcgccgcggtccggccggaatgcgtgccggaccgcagctttgtgcggtgatggcacatcgcctcgaagctcccgatctcgatgcggatctgcggcttgcaccgctcgaccatcgggaagatgcaaacggcgcgagaccaactggctcgcgccgtttgcttttcagcgctgctcatccgtgcgcgggacagcagcgctccctcgtcagaccagcgcctgcaggcggttggcgctctcgtccagttgctgcttgagcggcaagagcagggcgtggaggccgatgccctgggggatggtgtcgctctgcaggtccagcaaggtcaggaaggactgaagaccgacgctgacacgcaggatgtcgtcggtgacttcaaggatgtggtcctccagggggacggccttgctgggcggggggggcggctttgcgtggtgacgagcctgggcgcggtcgattttggccaggttctcggctagttgggcttgcttttgggcgagggtgggctcttggggagccggggtgttgctttgcatgattacctccaagtgagtgatggaggctcgcagtctgctgctaaccggggggcgagcacagggccgggttagtcagtatgactcccctggagcaaggagggctggcccgccgcgaggaatcaaacgctcgcacatgaccggtcaacgaagctggccgattggaaacgaattttgacatactggccaggtatgcaggtcagagggcgactgcaagtttgtccggaacgttaccgaacccgtgttctggcggaggtcgcttgtcggccataagccgtccttcccatcgcggtggcgctgccgctcgagcgactgttctgctcaaacaagggacgttgatgcgagatgtttcccgggctaggcgaccagcctcatcacccacaccgaggccgcattgaacttcccgggtcatcaaggacgagttcgacgccttcctcgagcctggcgcacgggctcctgatgcatgcgctgcggcgaatgcgggcaagaaaagctgctggcctccaactgcaagcgccgacggttttgcacctcaggcggtgctcgtcggatgtcatagaccgcagcataccttgtcgatcacgtcatcccacacgtgccggggcggcagtgggtgttgtcgctgcccatcccgctgcgcttgctgctggccgcgaagcccgagctggtcacgccggtgctgcaggtggcgcaacgtgtactgatgcgccatctattgagcggacaacgtgacggccaacacccacttgctcgcagccttcgcccgcagagggcccaatcttccgcccggggatcactacgcacgtttgaagatgacgttctccgagaaccactttgtactgctctccggatgcgctaggtcgccagtaaaaccctcaagtaccccttgaccggctgggaagcctttgcccttaaatgacccgatgtaccttccatctgagccatttttccagaggatggataggtgaaactcgttatctgttacgaaaccttcgaggcgagagcttacgtgactgccgtcggaagtttccgccgagcctgcaatcctatcctcgttctgcgtcaggaagacgtggacacgaaagccattgccctgaacaatatcccaattgcttccaacttgccaattcgccatggtaagactccctgtggaaaatgacctccgtcgacgaggacagtgactttagtctgaatggcacttgctaaagcccatttcgcctgaaaaagcgacatcaaacgctgcccagaatcgcggaccgagcaggtcatttcgagcaaaacgtataagaacacaaaactcgacccttgactggactttctgcccgttgtggaggggcttgagcggcaaagtcaatgccatttcgcttaagtccacatttactctagcccagcaaattggaagggtcaatgcaccaaccagggcgtcggtgagctcggtccttgaggaagaagtagcggccttcgtggtggctacttgctgtcgactgacccgtttgattgctctccacaatcgtcttcatcagcgactgcggccgttcggtcaggcagcccctcaagccgcttcggcagtttcattagtgatacgttatggatatcgtttcaatctgaaatgagcaagattcacatgaccctaattgggagctgtctatgatgattttaattgagtagcttccttctgaatgcctcagcacttttcacgccgaacccattacccattcaacggttagccatgaagctcatggactcttcgcgtagtgtggtgcaggtgagcacagaggttgtcgtaacaagaaagtggatgtggcaggtcgacattgccactacacgggcaatgggtgagaacgtttctgacttgaaaccgactgtgcgtggctactgccttattcgtactgcacgcctacgacaaagctgctacggtgcaagggtgctgatatggctgccgacaaccggggcgggagagggcaatcaaccttggcagccgcccatcaaatggccgtagaacactgaagctggcggcgtggccgcatcagggctttggctaggtgtaggtgctgcatttccaaatctaatattaagaaaccgcagcgcccgacgacgtgctcgccttctcattcgcctcacgcagaaacggagaagcaaagtgccaaacataacgtccgacggtgtttcaatccattacgaggtcaagggccaaggttcgcctgtgcttcttctggcaggacttgcggggatcggcgcatcgtggggcctcctaatcgaattgtttgccgagcatcaccaagtgatcgtccctgaccaccgcggcaccggcgcgtctgagcacaccgcgcgcgacatgacgatttcacaacacgcccgggacatggcgcgggtcatcgaggcggtcggatgcgggccggtccacgtggtcggttcctcgaccggtggcgccatcgcgcaactgctggcgatccatcaccgcgagctattacgcagcgcaagcattgtgtcttcgattgcacgggcggacgcgttctaccgtcgtcagttcgacatgcggcgacgcatgttgaccgattccggcctgcgcgcgtccaccgaggccaacgcactattcctctttgatccgagattcatgcgcgagcacccggagcaggtgcaggcgtgggtgaacgctacggcggctggcacatttgagcgggaaatcgcctttgcccggatcgacatgatcgtggggcacgacgcattcgatgagcttccttcgatcgcgacgccgacgctggtgttggtgggcgaacgcgacttctgcgccccgccgtacttctccgcggaacttgcaaagctgattccggaagccgagtttgccatcctggacagtggtcacttcatcttcctagaaaagcccgaactactgcacgacactgttgaggccttcatcgccaagcacgaaaaatgatgagcttagctctctgccggtaggcggaagcctcccattagagtgacgctgcgagcgggccgttatctagccgcggcctgcgaccggccggttcggccgaacttcggtcgtccgcagatgggtgcgcgaatgaccgagacggatcggaagtcgtctccggtgcaagccctgccacaggtaggccgagggccgaggtcggccatgagccgacgttcgagcgtcttggctaatgctataaagcggacactcgggttatcgcacgaggccatcacgaacccaagcctgcaaatactcgtagggggtactgaaacgccttggcctcagatcgcttccaacgccggaaagcgtcgttccgcgcatggggctagtcaccgaatcagcagagtggccgcgtaggtcttcacgaagaatgctagcgtgatgcagaaggtaacaagtagcgtgatggcccggatagtccccggcgtcgcccggcgcccgatccgcgcgccactgtatccaccaatgatcgcccccatcagcatgattaacgtctctggccagcgcaccgcattggccacgatgaaagcgaccaccgctacggcgttggcagcactgaccagcagcgtacggtccgcattgaggtactttaggtcgcagttgtcgagcagtctccacaccgcgatcatcatgattccaaccgcgcagccgaagtagccgccatagatgccaagcacgaactggacggccagtaccgcagacgcgtgaatgtgccagcgtgtgcgcattgcctccccaaagcgtcgcccgaacgccagggcaacggacgcaaccagaagcagccagggcagaacgaacgtgaacgccgcggatgaagttcgcagcaacaggtaggcccccaccaagccgccacatagcgtcgccagcaggagagcgcgcagcgccacggagccgaccgggcgcagtccatctcgataggcccaagcactggcaagcccgccaggaaatagcgcgaccgtgctggaagtattcgcttgaaccggaggtacgcccactgcaatcagcgccggcaaactgacgaacgagccgcccccggccagcgcattcatcgcgccagcgaatactcccgcagagaagaccagaatcattgcatccatggaccaatgtttcccgtgccagcatccgtctccccagcttacggaaaacttcgcttcgcctgcacaagcgaaggcctccctgcatctcgaatgcaatacttcttgtagaagtgaccgcaaaccactacggctaacgctccagccgtggcgcgcccaatgcccaccaattcaacgatctccgcggctgagggtgccaggcccgtcacggggccggcgatgccagcggcttccccttctcgaccacgtacacgccaagaacccgcgccgccgcgctactgttgttgtgggcatcatgcacaacgccggcaggcactacgaatgattcaccggccttgaccgtgcgcggcgactgaccatcgatcaggagttgcacctcaccttccatgacgtagctgatctcgtcgccgggatgcgtatgacgcccggcataggtgcctggcgctacctccacgcgcgcgacaacagcttcgcgacctggtacagatacatcggcccttcctaccaaagtacgggtaaggcccgaactctgcgctagcgcgctacctgccaccagtgccaccgcgcccaacatgatcaaactcttgtagtgcatgatgtctccttagacttttgttggagtttcgaaggtgctagcaggcgacctgcagagtgacgcgatataggcggcaaccccgcgcaccgtagaccggcagccataactgcgatcgcaaagacatatacagtgattcgcaaacgcgaagcatgtgttggtccctcggggcgcctcgagccggctgagccgccgactaaagcgagtcttttgccagcgcctctcgttgtatgtacgagaacgaacggagtaggcaagcgtgacaatccaaatggcgccgctaagacgtcccacgacccgacgacgactcgccgagaaagaggcgagaccaaggcattgaactcgtgccgcacggtctccaggcgctactcatttagcgacatagcgacatagcgactgcgcaccgcctgcccgctctgctgcctccattcggcctttttccagccgataccgatttttcggcctaatatgccacgaagcgcctgaagggccgatgcctgtgccccgtcaatggcaagtgctatgcgcacagtgggagccatcatgcgagccgcctggtacaccaaaaacggcgaagcccgtggagttctggtaactggagagctgccaactccgaccccaggccccggggaggtccgtgtcagagtcgccacatcaggggtgaacccgtccgacgtgaagtcccggcgcagtcgtcccctgaccagcgaccgaatcatcccgcacagtgacggcgccggtgtcatcgaggcattgggtgcggaagtgtctgctgcccggctcggtgagcgggtctggatttggaacgggcagtggcaacgtccgcttggaacggccgccgagtatatcgtcttgcccgcgacgcaggccgtcaaattgccagacaacacagaccttccctgaaggacgtgtagaaggctacttcgtgtcatgctggaccgggaaaagcaacgtgccttcgcttctggcgctgctgatcggattcacgttctcaatggccgtaagtcgataagacccgcacaagaacggagtccgcaagacggaagaggttggcagccatagcgctgctgcgccctagtgaaaacgaacgaacgctaccggactgtctaccgccatttgggttggctaccttgaccgtcgcagacgggtcgacaagagaccttcgttcaccttagataacgggatgcctcacgctgggtcagttccttgtcaccggaatcgaggtggtcgcggtctgggcgctgttcgaccgcttcggcgacgtgcagggctggcgcatcggcgaagtggcgctgttctacgggctggtgaactgcatgttcgccatcgccgatgccatcgggcgcggtttcgacgtgctgggcagacctttttgcgtaccggcgaattcgacgggtttcgtttttctcctggcggccatcggcgcatggcgtaccgggctgcgccactacacgtcgactggcagctagctggtcacggtctgggccgatattgagcgtcagccttcgcggtggcgcagattgacgaccgcgagagggactccgctgacatctgacggccggcgaacaccatgtctgtgtggccgccttcgaccatgcacgtatttgtctggaagcgaacagagcatgtctcacgagggctagtaccgttgggatcggcgggtgggctgcatggcaagccctgtcgccgatgacgcgacgaggcaaggctcagggcagttgcctgcgtcataaggcggggcggcgtgtgccgtgggcgctaccgcttctgcgcagccatggcgcgctggggatgccgtgtcaaatttctatgatctttcggggaaggcagcgctggtgaccggcggtgcaaaggggctcggccgggcgatcgttgcgcaactgatcgacagtggtgcgcgtgtgcatgcttgggatatcgtgccgttccagatggaaggtgccagcactgaggtcgtcgatgtctccgatgccgggcaggtggggctggcgctggcgcgactggtcgatgcgggatatcgcttcgacatcctggtcaacgctgccggctaccttggcccgatgcagccattcgagaatcacgaggcttcacaatggcatcgcatcatcgccgtgaatctcctggggaccatgtacgtcgtgcaggcgatgttgccgcacatgttgcgctggggaggcggccgtatcatcaatatgggctcgctggccggcaaggaggggctggccgggctggctgcatactccgcggccagcggcggcgtggtcgttctaaccaaagcaatcggccgcgaactggtgaagcgcaacatctacgttaattgcgtggcgcccgggcccatggataccgacatgattcacgggctcggcagccacgaggtggcggccatggttgctgatagcccggccgggcgcctgggcgatccggccgaggctgcgcacctggtagcgtggctatgttcggacgccagccgctttaatgcaggcgctgtctttgacatgtccggtgggcgggcgcgattttaaggaagtgcggatcttcggttggcatgccgtgagatcgattcgataatccgctccgacccgggcgtctacggcttgatcttccgcgaatcgcagcacgcgacacagacggcattcgagccaagcttcgtggcgcgaacggctgccgtcttacccggctatgggcattcggcgggcggcctgacatagtagttcccccgcaaaaaccgggaccgctgattggcggttcgccaatctccatggttggcattgcgctgcgccgggctgataatcacgacagtggtcttgggaggatgcataacgacgagggctgaggagggggacagccaggtcctggctggatgcggcgtttgctggcgcgtaccagcgcgcctgggccgcccttcaggatccctcgccattgctacctgccgcatcgcaacgacatattgcccggactccgctgctgcgcctgactggcacccgccggcggtcttcctgtcccagttttccaggagctagccatgaatgatccacagaaatccccgttgaccattgccgagggttggcaggcgccaccggaccgcaccggcgtgactgacgacgcccgcgtcgaagacatcattccgctgcctccgcctgaacacctgatccgtttcttcccgatccggggcacgccggtcgaatccctggtcacccagacgcgccagcgaatctcgcgcattctgcacggcaaggatgaccggctgcttgtgatcatgggaccttgctcgatccacgacccgcaggcggcactcgagtacgcacggcggttgatggagcagcggcagcgctacgccgggtcgctggagatcgtgatgcgtgtgtacttcgagaagccgcgtaccacggtgggctggaaaggactgatcaacgacccctacctggacgaaagctatcgcatcgatgagggcctgcgcatcgcgcgcagcctgctggttgatatcaatcgcctcggtttgccggcggccggtgagttcctggacgtgatctcgccccagtacataggtgacctgatctgctggggcgcgattggtgcccgcaccaccgagagccaggtgcaccgcgagctggcttcgggcatttcagcaccgattggcttcaagaatggcactgacggcaacatcaagattgccatcgacgctatccaggccgcatcgcgtccacatcacttcctgggagtgcacaagaacgggcaggtggcgacggtgcataccaagggcaacccggactgccacgtcattctccgcggcggcaaggccccgaactacgatgcggattccgtggcggccgcctgcagggaactggaagcggccgggctcggtaactcgctgatggtggattgcagccatgccaacagcagtaagcaacacctgcggcaggtcgatgtcgcgcgggacgtggcgcaacagatcagcggcggcagtgactccattttcggggtgatggtcgagagccatctggtccccggcgcgcagaagttcaccccgggcgtgcacagtccgtcggcgttgtcatacggacagagcattacggacgcctgcatcggatgggacgactcggtggcagtgctggacatgcttagtgaggcggtcaacctgcgccgcaggttggctttgtagccataggaaaagacgtcaggtcacttcatgcctccagtattcgcatcagaaccggtggcgaacgcccatcacggcacccgcctggttcttgcccggctgtacgttgaagacggccgacgtgccgctgccgctgttgaagccgttgacgcccagtgccgaattatccttgtttagcgcgtaggagactgacgcgtagaggtcggtgcgcttgctgagcaaatagtcgccggtcagcacgaactgccacgggtcagacccagtctgccggaagtcctggtagtaggccgtgccagtcagggaaaacgcctgcgtcagcttgtaagccaggcccagccagtaaaggttcgagccggcattggcctcctgggcgcccggcagcatggccccatcataggccttcgccaggcggtagcccacatataccttggcatcactcaccgcatacgtgccggccacggaaacgcgtcgcaggaccggcgcctggtttgagggcgtgccgacgtgcgcatcgtcataggccacgccgagcgcgaaggggccggaggcatagttgacgaacgcgccgaaattgcgcccgaatacgttgctgcccgccacttcgctgccattagcctggaaggagtagaaagcctgtgcggtgagtctcccgaactttccgacatatttgacggcattgtctgcgcgcgctccaaattctggagcaatcgagaggatgccgtagcggtcagcaatcgcattaggatcgtagatattgccgaattcgcgcatggcggtctgctgccgcccgaacagcagtgagccatagtggctatccagccccacataggcgccgcggccgaacagacgcccgccctgggccgaattgccggtatcgatgtcgaagccgctttccagataaaagaccgccttcagcccgctgcccagatcctccacgccacgcagaccccaacgcgagccagactggttcccggaaaccagtcgcacgacactgtcaccgttgcgcccagcattgttgttgaactcgataccagcgtcggcgataccgaacagcgtcacgccggactgggcagacacggcattggctgcgacggatgcggcaacgaccgcaagaatctttttcatctgacctctcattttgctcatggcagacgtgcatggcactgccatgcagtgcccgcagattaaccaactaccggcggccaatgcttgcataccccgtccatgccgcgcgtagccacggaacaagcgtacatatcgacacaggtcattccgcggcacacgcactttgaagctgaattgtattgctgtgtatctggatacgatggactattgagcgatgctttgtgcgaatgcccaccgaatacgctgtgatggaagggaacgtgatctgcggcctcacaagaagctgttgcgaaatcagttcatgcagtgctttagcctgctccggcaaatcagtgaacaggcaagggacagggagggttcgaggacatcgacatatcgttcgtatcgaagctctaggcgtctgaacgagtggagccagtcgagcgctccacgctgatccgctattcaggaatttgtagcaaaaaggcaccccgtagccgggggactagcggggcgctcaaggcattgcaggctggattggagcctgcctcccggagtgtgcagatgggcacccacacgcgatgttcgcttgcgcacgcattgcggacgagtgattgtattttcgtgatgtcggaacaatcgtaagcgccggcgggccgctcgaccgctcgaagcttatcgatgtcatgtctaggtacgggctggtgccggcgccaccaccacaatgaaaactgggcgtcgatttttcgggagactcatctgactgctcagggtcgacaagaggccttcgttcaccccgcaagtcgccatcccaaaaaaaacgtggcgagcctggtagctcgccacgtttatacccgggcttgtatcgcggtctgcaacctcaatccagcgtaattttccccgccttaacaatctccccgtagcgcgtggtatcgcgctcgatcagcttgcggaattcttcagaagtaccgcccaccggcacaaaaccgagatcggtcagcttcttcgcgacctccgggctgcgcgtggccgcggcgatttccctggccatgcgggccacgatcggttggggcgtgccggcaggcgccatcagcccggtccaggaactcatcacgaagccgggaaaacctgcttcttccatggtcgggatgttgggctcgcctggccagcgcttggcggaggccacggccagcacattgatcttgcccgatttcacatgcggcatcggcaccagcagcgggtcgaaggcgaccgagacttcgccggacaccagcgcgggcaggatcggcgcgctgccgttgtacggcacgtgggtcagcttgagcttcgattccatcgccagtcgctcgcccgtcaggtgcgcggagctgccgacgccgctggaaccaaaggtcagcgtgtcggggtgcttcttgccgtagtcgaccagttcggcgacggtcttgaccggcagcttcttgctggagaacaggaacagcggcagctcggccatttccgccaccggcaccaggtccgtgggcttgtagctgagcttggaatacagcgacatgttcgcgctgtaggcggcaagtaccgacacgaaggtgtagccatccggcgccgagcgcgcggccacgccgacgcccagggtgctgttggcgccgggcttgttttcgatgatgatcggctggcccagccgctgcgagactctttcgaacacgacgcgcgagacggtgtcggtggacccgcccggtgtgtaaggcacgatcaccttgatcggcttggccggccacgcttcggcggcgagggcagtgggggcggtgtgggcggcggccaggccggcaatggccatggcggcgaaacgcgcgctgcgcgccacgcggtgcttgatgctggacttcaactacatctccttctttggcttcttcgactatcccctggcggggatgctgcggccggatattccggccggccaattatgcgggacgcagtttcgaagaaccgtggcggtaccgcccaaatcgcgggcgcgggccatccactgtgcgatagccgcactgggcggacggctatcggcgtcagaattcgtagttgatcgacaggtcgaagaccccgttggtcgacttgcgcgtgatcgggctgtccgccgcatcgccggccagttgcgagatcgcgatatcgctggtggcaaaccagtgcttgttgaaataccacaccgcactgacgccgaagccgtaggacttgatgccgccgcgcgcatggtaggcgggccgtccggcgcgggcctgcgagtcgctgacgccgtaccaggcgttcatatagcgcgagtcggccagcgtcacggtggggccggcaaaccagaagaatttctcggagctgcccggcagcggcatataggcgccgatatcgccgacccagccgtcgctgccgcccaggctgcggcgcgcgtcgatgcgcagcaccagcgggaattccttcgagaccgcgtattcagcgaacagcttgccttcgggcgccgggttgatattgcccatgccgtccaggtgcggcgagtcctcctttgcgcgccgcccaaggttgtaggacagcgcgatccccgcgcgccagttcttgccccgcagcaggttcacgcccagcccttcgccgatcgaggcaaaggccaggtcgcggtagcggatatcgatgctgggcccgccgatgaggatgtattccgacgagccgtcgtagcgcggccgcaccatggccgcggcgccgagccggacttgccagtcggggatggtgtcttcaaacagcttctgtaacgggatgccggcggagaactgccattccgccagcggtgccggggtctgggcgctggccaggcccggggccaggacggcgccggcggccagcagcagggcaatgcacgagaacggacgcttggggtagagctcggtcacggcagcctccacgcccgccaggcgggcagtcaggttgcgggcacgaggcccgtgggcgacatctttccattggatggcggccagcgcaaccacccggggcctgagcgggcctcagtccagcagcttgtccagcgtaatcggcaggtcccgtacgcgccggcgtcgatggtgccgacgtcggcattgaccggcacgtggtactcggccaggttggcattggcaacgcgcccggtgacgggatccagctcggtcttctcatgcagcgccatgccgatgccccagataatgccgcccttgagctggctgtgcgcggtcttgcggttcagcagccggcccacgccgtagctggcgacgatgcggtggacgcggatctcgcccaggtcgggatcgacgtggacctctgcaaagaccgcgccaaacgcgtgcattgcgtattgcttccgctccttgccgggcctggcgctggcccgcgcttcaatcgcgtggccgcctgcgcgggtgatcggcgcggacacggattcgcgctgcgtcggatcggatcggcgttgcagccagccgtcgctgatctccacttctttcgccggcacgcccgacagcggcgaggcagcggctgaaccgaacttgcctcaccagcctgggcctcggccagcatgcccaccgcagagcagatctggcccggcgtgcagaagccgcactgcagcgcgtcgtgcgcgaggaaggcggcctgcatcggatgcagcgcgccgcactggccgcggtcgcagcccttcttggcgccggtcaggtggatcacttcgcgcagcgcgtcaagcagcgtgcagcggggctccagctgcagcgtgcagggcttgccgttgatgtgcagcgtgacagggcgggcggcggtgccgggggcagggcggtgctgcactgggcgggggccttgtcttcggacatttgcgggccttctgtgggaactccggcacggttggggacggtgcctgggatgcaggaaggctgcaagttcagtgccggggatggccgtggcgatgggcctgaggaaagccaggggaagccatggctggaaagtcaaaactccacggcgtttgtagagattacgctggcgcgtcccatgcgccgccaaataaaaaacggcgcccgaaggcgccgcctggtgatgccgtctgccgtcaggctcagcccttcagcacactcccgatggccttggccacgatccctacattgcgctcgttcagcccggccacgcacatgcggcccgagcgcagcaggtacacgccatgctgctcgcgcaggcgctcggcctggtcggcggtgaggccggtgtaggtgaacatgccgcgctgggtcaggtagcgcgacagggcctcgccgctgacatggtcgcgcaggttgtgatggatcgcctcgcgcatgcgcgcgatgcggccgcacatctgggccagttcttcttcccacagctggcgcagctcgggcgtggtcagcaccttggacaccacgcgcgcgccgtgcgtgggcgggttgctgtagttggcgcgcaccgcgccggtcagctggcccagcacgttggtggcttcgccggcggtgttgcagaacacgctcaggccgccgcagcgctcgccgtacagcgagaagttcttcgagaacgagttggccaccaggcagggcacgtcctgcgccaccagctcgcggatggcgaaggcgtcgtcttccaggccggcgccgaagccctggtaggccatgtcgacgaacggcagcagctggttggccttgagcagcgcgatcagctggcgccactggtcctggttcaggtccacgccggtcgggttgtggcagcaggcgtgcagcagcacgatgctgcccgcggggatggtacgcagcgcgtccatcatcgcgtcgaacttcaggccgccggtggcgtcgtcatagtacgggtaggtattgacggtgaagccggcgcgctcgaacaccacgcggtggttttcccagctgggatcgctgatccacacctgcgcctgcgggtagtagcgcttgaggaaatcggcgcccacgcgcagcgcgcccgagccgcccagcgtctgcagcgtggcgatgcggccggcggcgcgcgccggcgagttttcgccgaacaccagcgcctgcaccgcgttgcggtaggccaccaggcccgacatcggcaggtaggggcgcgggcccatgtcggccagcagcgcggcttcggccttggccacggcctgcatcaccggcaggcggccctcgtcgtcaaagtagatgccgatgctcaggttgaccttgtcggtacgcgggtcgcgctggaagtcctcgttgagcgagaggatcggatcgccgggaaatgcctcgatgtgtgcaaacatgggatgcgatggaattgggtcggggggcagctgccgcggcgcagggggcgtcgcgcagcctgaattctaaccggcggcgcccgcagtctgcaggcgccgccttgccgcttcagcgcagttgctgggcggcgatgccgctttgcagcgcggcggccgcgttcttctggcgcaccaggtagctcacgccgagcaccaccagccacaccgggatcaggtagaccgagaggcgcaggccaggcgtcaggtacatcaccaccaggatgccggccaggaacaccaggcacaggtagttggtgagcggatagccccagctctggaacttcgtggcctggccggcgcggcgcttgtcggcgcggaacttcaggtggatcaggctgatcatcgcccagttgatgatgagcgccgacaccaccaggcccatcagcatctcaaaggccttgccgggcatgaagtagttgatcaccacgcaggccgcggtggccacggccgagaacgccagcgcggtcagcggaatgccgcgctggttgaccttgagcagcgccttgggggcgttgccctgctgcgccagaccgtacagcatgcggctgttgcagtacacgccgctgttgtagaccgacagcgccgcggtcagcaccaccacgttcagcacattggccacccagttgctgttcagcgcgtggaagatcagcacgaacgggctgccgccggtgaccacgttctcccacgggtacagcgacagcagcaccgccagcgcgcccacgtagaagatcaggatgcggtagatcacctggttggtggccttggggatggtcttctcgggagaatccgcctcggccgcggtgatgcccaccagctccagcccgccgaacgagaacatgatcacggccatggccattaccaggccgcccatgccgttggggaagaagccgccgtgctgccacaggttggccacgctcgcttgcgggccggcattgccggacagcagcaggtagccgccgaagccgatcatgccgatgatggccgcgaccttgatgatcgagaaccagaactccatctcgccgaaggacttcacgctcgacaggttgatcaggttgatgatcacgaagaaggccagcgccgagacccaggtcgggatctcgggccaccagtactgcacgtagatgccaacggccgaaagctcggccatgctcaccaggatgtacagcacccagtagttccagcccgacaggaagccggcgaagtggccgcagtatttgtcggcgaagtagctgaacgagccggcgacgggctcgtccaccaccatctcgcccagctggcgcatgatgaagaacgccacgatgccggcgatcgcgtagcccagcaggaccgagggccccgccatcttgatggtctgggcgatgcccaggaaaaggccggtgccgatggcgccacccagcgcgatcagctggatatgccggttcttcaggccgcgcttgagcgtgccgtcattgctgcttgcatgcattcagttgtttcctctacccattctcatggaatgcgggcccgcgcctctggctattgtcgagtcggacgcttgggcctgggggacgtcaccgcccgcgcggcagggtcactgccgcgaaggaggtgtgcgcgtttccggaaccggccggagccggtcagggaagatcgatgccggtcaggcctcgaccttgagcgtgccgcgttcgatctggtcgcgttccagcgactcgaacagggccttgaagttgccttcgccgaagccttcgtcgccgcggcgctggatgaactcgaagaacaccgggccgagcgcggtcttggagaagatctgcagcagcaggcggggcttgccgccttcggtggtgccgtccagcaggatgccgcgcgacttcagttgctccacaggctggccgtggccgggcaggcgcgtgtccagtgcttcatagtagtagtcgttcggcgcagtcatcagcggcacgcctgccagttgcaggcggtcgatgacctcgatcaggttgtcggtcaggaaggcgatgtgctggatgccctcgccgttgaaggccatcaggaactcttcgatctggccggcgcccttggacgattcctcgttcagcgggatgcggattttaccatccggcgcagtcatggccttggaggtcaggccggtgtactcaccctggatgtcgaagtaacggatttcgcggaagttgaacagtttttcgtagaaattggcccagtaagccatacggccacggtagacgttgtgagtcaggtggtcgatcagcttgaggccgtggccgaccgggtggcggtcgacgccttcgatgaattcgaagtcgatgtcatagatcgacttgccttcctcgaaacggtcgatcaggtacagcggcgcgccgccgatgcccttgatcgcgggcaggcgcagctccatcgggccggtcgggatctcgaccggctgggcgcccagttccagtgcacgggcgtaggccttgtgcgaatccttgacgcggaaagccatgccgcaggcgctcgggccgtgctcggcggcaaagtaggcggcgtggctgtgcggctcgcggttgacaatgaagttcacttcgccctggcggtacagcaccacgtccttggagcggtgctttgccaccagcgtgaagcccatctgctcgaacaggggctcaagcacgtttggggtgggcgaggcgaattccacgaattcgaagcccatcagctgcatcgggttgtcaaacaggtcggccatggctttctcactaaaggggcgggaaataatattgtggctgcggcacttggcaacgaggtcgcgccggagtcagtcggctcggcggaaacctgttgcaggacaggcctgtagtgcgcttgcttgggatgcagtgtatattcctgacggcaaaattggatttcgtaaaacaggcagggaaaccctagattatgaaattcgattgcgtgaatctctgatgtgaggaaatcaaagtgcaatcgatcgagctggaccgtaccgatcgccgcttgctgggggttttgcaggagcaggggcgggcctccaacctggagctggcagaggccatcgcgctgtcgccggcgcagactttgcggcgccaccgccgcctggaagaggccgggctggtcaaacgctatgaggcgcggctggacgcggcggcgctgggctttggcgtggtggcctttatccatgtgacgatggagcgcgggcatatccgcgacctgtccaacttcaagcgcctggtggcggaactggcgcagatccaggaatgcttctcggtgaccggggatatcgactacgtgctcaaggtggtcgcaaaggacctgaagtcgctgtctgacttcctgctcgatacgctgatgcgtatcccgggtgtcagcggcgtgaagtccagcgtgtgcctggacgagatcaagtgcaccagcgcggtgccgctggaggcctgaacccgaagggaaggctgctgccgggccgcagggctaggcgtggtcgacgccgcgtggttatttccacgcaaggaggccgcaacaacgccctgcggcccggcagcagccttcgcgcccctttttcattctgaaacgggttcttaatcttccggctggtcgaggcggtcgcactgtacgttcattgcccggcacaccgcgcaccatgatggccgcgagccgggcttgacgccgcagtgggcggcctcgtcacgcgtgccggcctggctgtcgggcgcgctgacccgcactggcacggctatctcgcgcacccggtggccactggcgcaggcttgtgccaccgccgcatccagcgcctgcaggccaaccggcttgacgatcacggcattcatgcccgccgccagcgccgcggcatggtccaccgcgacggcgcttgcggtgcaaccgatcaccggcacgctgccgcgcgcatccttgcgtgcgcgcaccgcccgtgcgaatgccatgccgtccatgaccggcatggcgcagtcgcacaagatcacgtcgaagctggaccggtccagcatggccagcccttcgcggccatcacaggcggtgctcacgcggtggcccaggtgctccagctggcgctgcagcagcagccggttgggcgcatggtcgtcgatcaccaggacgttgacccggcgccgtgcgcagcccgccatgggcggcggcaccggctcgggcagttccgtggcgacggcaagcgccaacggcagcgtcaccatgacgcgcgtgccctggcccggctggctggacagcgagatctggcctcccatcgcgctggccaggcgctggcagattgccagccccagcccggtgccgccggcatggggccgggtgcggtcatgcacctgttcgaagggttcgaacatgcgcgcctgctcgccggcgggtatcccgatgccggtgtcggagacggtcagcatgacctgctgcacgccgtcgcgaggcgccagggcgtcaagcctgacgtggatcgtgccgctgtcggtgaagcgcaccgcgttggacaccaggttggccaggatctgacggaaacgcagcgcatcgacctgatgcagcggcgcaacggcgacgccgatgccgctggtcagcggcaggcccttctgtgccgccaccggcccgaagatcagcagcgtgtccttgaccagcccgggcagcgaagcgggtgccgggtggatgctgaacttgccggcctccatcttggacaggtccaggatgtcgtcgatcagcgccagcaggcccactgccgacttatgcgccgtgaccagctgcaggcgttcctgctcggccagctggcagcgcgccagggtcagctccagcatgccggtgatggcgttcatcggggtgcggatctcatggctgaccgaggccaggaaggtggacttggcgcggttggcggcctcggcttctgtcttggcctgcgccagctcggccagcatgtcgtggcgttcggtcaggtcgacgcagccgccggccaggcccttgacggtgccatcggcgccgcgcagcggtgtcagccagttcagcacgtggtgggtgcgcccgcccaggcgcaggcagcggtccttgtgcagcgggatgccgtccttgatcaccttgcggtagtcgcgctccacctcggccatgtcgatggcgatgggatgcacctggaccgatgtgtccagcggctgcccgcgcaaggtgtcgcgcgtggcgccgaccagttcttcatagctgcggttgcaggtgatgagccgcagcgaggcatcgcgcaggtagacaggctggggaatgccgtcgagcagcgccgactggatcgcgatattgtccttcagcgcaatctccgcggcgcggcgccggcgcacctcgcgatacagcacgaagatccatgccagcaggcatggcgtcagcaggcagagcagcccggtcgtccaccccagcacctgccagtgcgcctgtggcgctgcttgtggtggcggggctggttgcagggccggtgcctcgggcaaggcgactggcgtgccggccggggatggcgctggcgcgggatctgccgtccgctgggcaacggcgcaggccaatacgctgacgaacaacgcggcacttgccagccgccaggcgcgcgtgaagcggtgcgggcaagcggtggccgatggagattcgttatggatgggctgatgaatggacaagcggggcggcaaaattcagtgaaacatggcagcggccgccgcgcggttggcgtagcggtggctggatagttttcactctatgggctcagcctcgatatctcattaggacgaatctgagattgggggtgaaatttccggatcacgcgccgttgatgcctttcacgtcacatatcgaagataaatgccgggcagcatctcacggggccaacgccggcatcagccaggcacgcacgcgccagcgtcgagaaacccgatggcggcaggcaggtccaaaacaaaaccttccggtaccccctgccatggtccggcgacgtggtttttcagctgtggcggcagcgttatgattggattgcgcaactgccatggtccgcattgcgccaggcctgcaaaaccagccgggttttcggaagaagcaagcccgcgctcggaaatttccggtgccctccggcacaaatgctgagcaaaatgatgtgcatgggcgcccggacatcagggcgcctgttatggagttcaagttttgaccacaatcctgatcgtcgacgaccacccgcccgtgcgggtggtgctaaagacgcacttttcccaggtgctgggcatcacccatgtgcttgaggccgacaatggccaggccgccatcgagatcgtgcggcagtacacccccgacgtggtgatcctggacctggacatcccgaagatcaacgggctggacgtgatcccccgcctcaaggcctgccaccccgccgtgcgcatcctggtcatttccggccaggaccagaacacgtttgccccgcgcgcgcgccaggccggcgcgcatggttttgtcagcaagacccaggaactggccgagatcgtgcgctgcaccgagtccgtgctggccggctatacggtgatgccggaaaccgaccgcggcaacaacgccggccacgccgacgaagccgcgcgcctggccagtctttccgacaaggaactggtggtcatgcagatgcttgccaagggcatgtcgaacaaggaaatcggcgaaaccctgtttatttccaacaagacggtcagcacccacaagacccgggccatggaaaaactcggggcaaaatcgattgtcgatgtcatcgactttgcgcggcgccaccatatcgcgatcggctagcatgctgcccgtgattcgactcgcattgagaagcggcgcatgaccggcgcgttgctgcttgccacgcccggcgacacgcgctgggtcgccggggttgccccgatcctgcgcgatctcggctttgatgtgcacaccgacacgcccgcgccggacgccgccgcagacatcggcctggtgatagccggcgccgccaccgagatccctgacagcctgttgcgcgcctggcgtgccaccggcccggtctgcgccgtggtgctgccggccgacgcggtgccggtgcccggcgcggacgaaggtgtgatcgcctgcctgcgcgagccggtgaccgaagcggccatcgtcgccatgctggcccgccagcgctacctggcgctgtccccccgcgaggctgcgggaatcgggccagccatcgcgtcgcagaccttcggcaaccgcgcctttgccgctgagctggtgcacgccctggtcacctcggcgcaggccgacctggcgcagttgcgcgccgcggacggtgcgctggacaccgtgcgcagcgtcgcccaccggctcaaggcatctgcccactacgtcggctgccatgccttgcgtgctcttgcccagcgcctggagcatgccgccagcgacggcgatgccgccaacgccgctgcgctggccgcgatcgtggcgccgacggtggcgcggctgctcgccctgctggcggcgctgccatcggaaaaataagatggcggcggtcgccggcagctccggtgcgggaatacaccggattggcccggtgcggtcggttgattatgctcggatatatcagggcgccgattttcaatattctggaattaatgacgccgattaatgcggtgcgtttttatatgacggcgcggacgccggattctgatattcggcaggacggttagtttgacgatattttccgggagcgggcatgggtcagatcatggcgtcaatgccggagtcggcgttttatttccatctggcggcggtaaccatgctgctgctggggctggcgctgtatcgcgcggtgtcgcacgtgatggcgaccccggacgggcgcaaggcccgcgcgcagcgcctggcactggtgaccgcggggcggctgctggcgctcggcggtatctggaccgccatcgcctatggccacggcgcctgggagcgcgccggcgcgcataactgccggcacctgccgtcgttggatgccgccgcgcgctacgcagcggaatactgctatctgggtcgggagcgggtgttgctgcgcatctacggcgtggagcgcgaccgcgtgctggcccagcgcaccttcaacagcagcgggccggtgcggctcagctgggacggccaggccgtggtcttcgatgccgcggcgcctggcaaggcagggcgcctggcgctgccgcccacgctgggcgaccggttgctggcgcggctgccctgatccggcgctctacaactagtctgcgtgcaagcgcgccagcaaggcgtccagccccgccggggccggcaggcgcgcgatcagccagcgcaccgcttcggacaagccctggccgtcgtagtccggcgcgaagctgtgcagcgtggcgccgtgcaggaaacagcgcagcgccagccattccggctccggcggcgcgtccggcggctggccgaacagcatctgcggcacagcctccagcggcgcgcgcacggcggtggccaggcgcgcgtcgccacgcgttgccatccacacctccagtatggcgagcgaggtatgccgctgtgggcgggtcgccaggatatgcagcatcaggtgcaggcacagcgaggggctgagcgggcccagcgcggccaggcgcgccgcctcgcgctccagcagccaggtgagcatggctggcagcaggtcatagcggccttcggggaaatggtgccgcagcgagccgcggctgctgccggccagttcgcacacgcgcgcttctgaaaaggccgcatagccttgctcgacgagcaaggtcacggcggcgtcgatcagggactggcgggtgctggcgctgcgttcggcttgggtggacatctgtcggattgtagcaatggctgccagagcgcagcctggcgcgcgggcagggtgagcttgccttgatccgcgtcgatgagggcggtaccagggcggccagcatgcggcgcggcacaatccgttcgggtacttccacccggcgctgagcggcgtcagtggggcgccgccgccgggatgtcggcgctgcagctgggcgtcgcttcgtcgtgcgaatgcggcgccagcgcgcccggtatgcgctggctgtcaagccccttgccttgcagccattgcgcggtggtggccgcggcgcggtcgatcagctcgccgcatttggagtagtcgtagggcgagatgtcgagcgggcacagcggcggcaccacgctgatctgcgcgcggtcggcgaagtgctgcaggtcgtgcacgagctggcgcgccaccagcagcgagagcgcattgaacgcatgctccagcgcgccgcgcggcgggcggcgctccgcacaggtaaagcccgcgggcagcacgatcacgtgcgtggcaccaagtgcgatcgcggtggataccggggtgttgttggccacgccgccatcgatcagcgtgcggccctcgaactgcaccggcgggaacacgccggggatggccgcgctggccagcaccgcgtcgactatgctgccgctggacagcaagacttcgtcgccgctgtgcatgtcggtggccaccacgtgcagctgcagttccgctgcttccagccgcagcgtgccgaagtgctgcgccagcagtcggcgcaacccggccgcctccaccaggtggccgcggttgccgccgaacatgctccagacgctgcgccagctccacggcaggatgtccgagcgccggatgccgcgccacagcgcgtcaagccggccggcgccggccacgcccggattgcaggcaaagtaggcgccgttgatggcgccggccgaggcgccgatcacgatatcgggcatcacgccccatgccgccagttcgcgcagcatgccgacctggatcgcacccaggctgccgccgcccgcaaatacgaaggctgtcttgtccatggctgcgccggtctccctgtccagtttgcggtcctgagcaaaggataggtgacatccgggccatcgggcaggtcggacggcaagccgtctgccgcgctggggtctgagcctgtggctcgccttcgcgaggtaataacgcaattaaccgccagcaatatcctccaaccaccaatgctggctaacagcagggtggtcggtaccgtcagccatgacgcaggcgcggtgtcagtcgagaaactcgtcgacagggatgccgagttggccggccatgtgttcgaccaggctttgcagcttcgccaccttctcggtcagggcctgctgttcggcgcgcagctgttcgagttcgcccggcgcggcggtggcgccgccggtggtgcggtcggcatcgtcggcgtccgccgcggcgctcacttcgccgctcagcaggtgcatccagcgattttcgcgtgcgcccggcgcgcgcggcagccggacgacaaagggcggagcatggctggccagttcgtcaaggaaggcctcgaccgacgagatatcggcaaagccgtgcaggcgcgcggtgttcaggcgcagctccgccgcggtctgcgggccgcgcagcagcagcatggccagcagtgcgacggactggctgggcacggccagcacgcgctgcatattgtgctcgaagcgcggcacgcggctgctgctgccttcaaagaccaggctcaggcccttgaggccatcgatggcttcaaggatatcggcctcgctgacgttcatcaccggggcgcgggcggtcttctggttgcagcccgaggccagcgcattgagcgacagcgggtaggtatcgggcacggtgtgctgtttttcgaccagcacgccgagcacgcggccttcgacgggcgtcagggggcgcaatgccggacgggcggggcggtcgccagcctggctggcgtcggaatcatggttggattgcatcaagactggtttcttgctgaaggtgacggcgaatgccgacacgccgaggcgctcattcaatcccaagccagcgcaatccgcaactgcgccgtgcgattctcgcattctgcgcgcagccgtctactatcgataggccgcgcgcaaccgggaagatgtgcccagggcaggcgcgggtccagacggggagggagcatggcgatttcgcagtcggaggcaatggccccggatgaggacaccggcccggaggccggcggcggcctggaggcgccgtattccacgctggagtcacgctggcaccagatgttcccgcagctcggcgccgacgacatggcgcgcgtgcgccgctttggcacgccgcagagctggcgcgcgggcgagaagctctttgccatcggcgatacgggccggggcatgtacctgatcggcagcggccgcgtgcgcctgatgcggcgcgacggcctgggccgcgagcaccagatcaccgagcagggcgccggccacttcctggccgaggtcggcacgctcagcggccgcccggcgctggtcgacggcgtggccgtgaccgatacccagggctatgtgatcacgccagagcggctgcgcgccctgctggtggccgaggccgaactgggcgagcgcatcatgcgcgcgctgatcctgcgccgcgtggggctgatcgaattcggcagcgggccggtgctggtcggccacggcaccgagccgcagctggtggcactgcaagccttcctgcggcgcaacggctacccgcatacggttatcgatatcgacgccgaacgcgactgctcattgctgctcgactatgccaacgcgcccgccagcgacttcccgctggtgatctgcgccgacggccgcgtgctgcgcgcgccggacgaagggcagctggcttcgtgcctggggctgttgccggagttcgatccggtccatgtctatgacgtggtggtggtcggcgccgggcctgcggggctggccacggccgtgtatgccgcatccgaaggcttgtcggtggcggtgatcgattgccgctcgccgggcgggcaggcgggtgcgagtgcgcggatcgagaactatcttggctttcccaccggcatctccggacaggcgctggccgggcgcgcgttcgtgcaggcactgaagttcggcgcgcatatcgccatcccgctggaggtcaaggcactgcattgcggcgcggacccgatccggctggagctggccgatggccgcatgatcccgacccacaccgtggtgattgccaccggcgcgcagtaccgtcgcccggacatcgccgcgctggagcactttgaagggcgtggtgtctactactgggcttcgccggtggaggccaagctgtgcaagaacgagccggcgatgctggtgggcggcggcaattcggccgggcaggcagcggtctacctggcctcgcacgcggcgcacgtgcatatgctggtgcgcgggccggggctggccgccaccatgtcgcgctacctgatcgaccgcatcggttcgctgcccaatatcacgctgcacacgcacgcgcagatcagcgcgctggcgggggaagggtggctcagttccgtgcgctacgaatgccgggcggaaagcccggccccggtcacgatggacgtgcggcacctgttcctgttcatcggcgccgatcccaatgcgtcgtggctgcgcacctgcaacgtcgaggtcgatgacaagggcttcgtgcgcaccggcggcggcgagctgggctgcgcgtcggcggtgccgtatccgctgcagaccaacgtgccgggcgtgtttgccatcggcgacgtgcgggcgggatcgaccaagcgggtcgccgcggcggtaggcgagggcgcggcggtggtggcgcagatccacgactacctggctcgggtgcaggcagccgtggcgcgctgagcgcgggccactcaggcttgcgcctcgcgctccagcaactcgcgcttgcgcgccacgccccagcggtagcccgacaggttgccgtcgctgcgcaccacgcgatggcagggaatggccaccgccaggtggttggtggcgcaggcctgcgccaccgcgcgcaccgcacgcggcgcgccgatgcgggccgcgatctcggcatagctggcggtgctgcccgcggggatctcttgcagggcctgccatacacgctgctggaacgcggtgccgcgcacatccagcggcagcgccaggccgattgaaggtgcctcgataaagcccaccacttgcgccaccagttgctcgaactgcgcatcgccgccgatcaggttggcgcgcgggaactggtcctgcaggtcctgcaacagcgtttggggatcgtcgcccagcaggatcgcgcagacaccgcgctcgctctgggccaccaggatcgcgcccagcgagcactggccgatggcaaagcggatatcggtgtcggccccgcccgcgcggtagcgcgacggggtcatgcccagcactgcgtccgaggtttcgtagaagcggctgttggagccgaagccggcgtcgtagattgcctcggtcacggagtcgctggtgcccagttgctcgcggagtttcctggcgcgatgcgcggcggcataggcacgcggcgtcaggccggtggcggccttgaaaaggcggtgaaagtgataggggctgacgcccgctgcgttggccagttcgggcagcgtgggcagggtgtcggcggcctcgatgcggcggcaggcgtcggccacgatggctgcgtgctgtgccgccagcgcaggcgcggcggcacgtcggctgggccggtagccggcggcttcggccgcggcggcattgtcgaagaactcgacattggccggatgcggcaggcgcgacgggctgctcggcaggcagtacacgccggtggtcttgaccgcatagacaaaggcaccgtcggcgcccggatcgcgcgccagcacgcgagcccagcgcgggtcgcgttcgatggtgctgacttccggttgttgtgtgggacgggtcatgggatacctcacgtggcgtcgtggaagatgatgcccagcgtgtagcgctggcccgcgtgcagccggctgacgccatgccgcaggttcacgcggtagctgccgcggctgccctgcaccgggcgctggctgacggcaaagaccacggcatcgccctggtgcagcgtcaccacctcggcccgcgactgcatgcgcggccgctgctcggtcatcacaaattctccgccggtaaagtcgcggcccggctcggacagcaggatggcgacctgcagcgggaatacgtgctcgccgtacaggtcctggtgcaggcagttgtagtcgtcggggccgtagcgcagcagcaggggcgtcgggcgcaactggccggcgtcgtggcagcgggcaagataatcggcgtgcgcggcgggataacgcacatcgatgcccatggcggcgttccagcggttggccaccggcaccaggtgcggatacagcgccgtgcgcattgcggccacggtgtcgggcagcgggtagcggaagtacttgtactcgccctggccaaagccgtgccggcgcatctcgatgcgagagcggaaccacgcgtcctgcgcatagccggcggcaagcgcgtcgcattcggctgccgacagcaggccgcggatcgcggcgcagccgtagtcgtcgagctcgcgtgcaatggcggcccagtcggtgccatcgacgcgggtggcgatatcggcttcgtgcctatgcccccgcgccgtgccgcgcgctggcagtattggccggcgcggccctgccacggccatttcgggacgctgtatctggctgatgctcaccgcgggtctcctttctctcgcttgcatggtgccaactttaggccgcccgcgtgcacctggcactccgggtcttgcttttgaattctgcccggtatcctgccttgacaagacagatctgtctatcaataatgagacaggtctgtatcatattgagcagcctgttcttccatctgattcaccctgtttcagcaaaggagcctccgcatgtccgcacaagccgaaatccgtccgccgttgcccccattcacgcgtgaatccgccatcgccaaggtccgtgccgcggaggatggctggaacagccgcgatccagagcgcgtggcgctggcctataccgtcgacagcgcctggcgcaaccgtgcggaattcgtcaatggccgtgccgacatcgtcgccttcctgcagcgcaagtggcagaaggagttggattaccggctgatcaaggagctatgggcgcacgacggcaaccgcatcgccgtgcgctttgcctatgaatggcacgacgattccggcaactggtaccggtcatacggcaatgagaactgggagttcgatgaggcggggctgatgcgcaggcgttttgcctgcatcaacgatgcgccgatcaaggcggcggaccgcaagttccactggccactgggccggcggccggatgaacatgcggggttgagtgaactggagttgtgaagctgttgggtcctaaaaccgaaggtcccgcttgatgtggttcctagctggaccacccctcaccccgggcctctccccatgaggggagagggagcacacaagcgcagagggacacgcctgaaaccctcgttactgcatcttgtccaggttcccgatccgcaccagcatctcggtgaacatctgcatatccaggttcaggtcggccacttccttgtactcgcgcgcgttgtgcgcagtgtatttcttgcccggcatggccggcccgaagttgatggcattgggcatcagcttggcggtggtgctgccggcggtggaaaccggcttggcttccagcccggtggtatcgccaaagatattcagcagcgtggacagccacgcgcccttgggatcgcgcgccatccagttgccctggtcgtacttgatttcgactggcccatgggtggcggcccagccgaagatgcgcttggtgatcttgccgcccagctcgtccggcgtgcggccacgcggcatgcgcacgttggtgaccacgtcgacgtattcgccgcgctcgcgcaccagcgtgggcgacatggtcagcgggcccatgaacgggtcccggtaggccacctccatcctggtgccaaggtaatccagcccgtacaggtcgttcaggtagcggaccgcgttcaggtagtggttctcggcaaactgcacgcggctggcctgcaggaacagcgccagccgcggcagcgggttgaccccttcctcagggcgcgatccgtgcgccgaggcgccagtgaccttcacttccacgtcgttgccggcgcgcttcacgtcgatggagaacttgccgcgcggggtgtggcggcgcaggaattcagcgcgtgcctgttccagcgcggcagcgacggcggcagcatcgccgccggcaatgcgagcggtggcggtctcggggatggcgttggccgaggccgcgccgcgcatggcaacgatggcaggtcccttccggtcggacttgccttgcgcgctcttgtcgtccgccgccttgatgccgaaggaaacggtcagcgtgcccgcgcctttctccgccaccaccgcggggtatttgctgtcgagcacgacgttgtactcgggcagggtggtgtgctggcggtagtatttcatgccgtcgccgccggtttcctcggtggtctcgatcatcaggcggatggtgcgctccagcggcacgccgctttccttgacggtcttcatggcatacatgaccgcggcgatcgagcccttgtcgtcgatggtgccgcgcccgtacagcatgtcgcccacgcgcgtcatgcggaacggatccagcctggtgccgtcctccagtacccattcctcggccaccgcgggcaccacgtcggcgtgggtcaggatgccgaaggtatccttgccgccgccgggcagcgtgacctcgaagacccggttgtcgacattgcggtaggccagcccgaagtcgcgcgccatggcctcgatcatcttgccgaactcgatgatggcggggttctcgtgctgcgggattttctcgtcgcgcacggtgcgcagcgccaccatcctgccgatggcgtcgatcaccgcggcctcattgcggacgcggttgtagacgcccagcaggcggccgatattgaccaggttgtcgccggccagtggcgaccgggcctgccacgccgccacggccggcgccacggaaggctcggccctggccgcggcggccatgaatgcctgcaggtcggcctgggccgccgttcgggtgccggagaccagcgcatccagcgccggtttcttcagggtttgcgcctgcgcggggtgcgccagcaccagcgacagcgcgagcatcggggcccatcggtagagagacggcaggcggcaaggtcgggtcattgcggacaaaacgggagtctgagtggatgccgcatgatagggcactcgccggtatttgccgaaaaaatatgcttttgcgtgcccgcggatgaagtgcaagggccggcgcaataggggatggccatgccgagtcaatagcgtaaggcaatcgtcgtggttaaaacgatgaattgtacaaatcacatcccggtctacagaatggggccttcgctgcaacccgcagccgaaaccaacccgatccagaccaaggagtgaactgatgctgcaatcccgtgaaggccaacgcgttcccaatgtcgctttccgcatgcgtgaagacaacgagtggaagaccgtcaccaccggcgagctgttcaacggcaagaccgtggtcgtgttctcgctgccgggcgccttcacgccgacctgctcgtcgacccacctgccgcgctacaacgagctggccccggtgttcgcgaagcacggcgtggacgacatcctgtgcgtgtccgtcaacgacaccttcgtgatgaacgaatgggccaaggaccaggagtccgagaacatcaccatgatccccgacggcaacggtgaattcaccgaaggcatgggcatgctggtggacaaggccgacctgggcttcggcaagcgcagctggcgctattcgatgctggtcaaggacggcgtggtgcagaagatgttcatcgaaccgcaagagccgggcgacccgttcaaggtgtccgacgccgacaccatgctggcccatatcgccccggacgcgcgcaagccggaccaggtggtggtgttctccaaggtcggctgctcgttctgcgccaaggccaagcaactgcttgacgacaacggcttcgactatatcgacgtgccgctggacaacaaggtgcgcggcaaggtgctgggcgccgtgtcgggcgagatgaccgcaccgcaggtctttatcaacggcaagctcatcggcggcgccgaggcgctgcagcagtacctgggcaagtaagccgattctcccttcatcccgcacccggggaccggcagtcgccggacccgatggggtcgccttgcccggcatggcggccccatccagcccgctgattgacaccagcttgacgccatcaagacaaaggaattgaccgccatgaccaccatccagaccgacgtcgccgtgatcggcgcaggcaccgccggccttgccgcctaccgtgccgcgattgccgcgggcaagcgcgccgtgatcatcgaaggcggcccgtacggcaccacctgcgcccgggtgggctgcatgccctccaagctgctgatcgctgccgccgaggccgcgcacgaactgcgccacactgcgccgttcggcgtgcacgtggatggcgaggtccgcatcgatggccgcgaggtgatggcccgcgtgcgcagcgagcgcgaccgctttgtcggcttcgtggtgcgcggcgtggagaacatccccgaagccgaccgcgtccgcggctatgcccgctttatcgacaacaccacgctggaagtggatgggcacaccaccgtgcgtgccagccgcgtggtcattgccaccggctccacgccgatgctgccggcgccgttccaggtgttcggcgaccgcctgatcgtcaatgacgatgtgttcgcttgggaagacctgcccgccagcgtggtggcgttcggccccggcgtgatcgggctggagcttggccaggccttgtcgcgccttggcgtgcgggtgcgcgtgttcggcgtcagcggctcgctcgggccgctgactgatcccgtgatccgcgcctacgcggcgaagaccttcaacggcgagttctatctcgatccggacgccagggtgaccgacatggcccgcgacggcgaccaggtggtggtgacttacctggaccgcgaaggccgcagcgtgaccgagcgcttcgactatgcgctggtcgccaccggccgcgtgcccaatgtgcgcggcctgggcctggaaaatgccggcctggcgctggatgcgcgcggcgtgccgctgttcgatgcgcgcacgctccagtgcggcaatgcaccggtattcattgccggcgacgccaacaacatcctgccgctgctgcatgaggccgcggacgagggcaaggccgcgggcgagaacgccgccagctatccgcaagtgaagccgctggcacggcgcgcgccgatcgcggtggtgttcacggacccgcagatcgcgatggtcggccagcgttacgccgacctggccgaaggcacgttcgtgaccggcgaggtcagcttcgaggaccagggccgcagccgcgtgatgctgaagaaccgcggcctgatgcatgtctatgccgacaaggccacgggccgcttcctgggcgcggaatggaccggcccgcgtgccgagaacatcgcccacctgctggcgtggtcgtaccagcagggcctgaccatcgggcagatgctgggcatgcctttctaccacccggtggtggaagagggcctgcgtacggcgctgcgtgatgcggaggcgaagctggaggcctgagcgggccaggtttgctagacaggtctgtctgtcatagtatcgacctatagagaggcagggcggcgcagggcgctgtccggccgcgcacctttaccgactacgccgccaccatggccacgccttccgcccgcgaccgcatcctcgacaccgctgcccgcctgttctaccaggggggctaccgcgccaccggcatcgacaagatcattgccgaatccggcgtcgccaagatgtcgctctaccgccatttcgcctccaagaacgagttgatttcggcgttcctggaccgccgccatgacgagtggatgacgtggttccggcaggacgtggaagcccggctggccgcgcgcccgcacctggacgtgattgccgacgcgctggcggactggttcggccgagacttccgtggctgcgcctttatcaacgtggtggccgaggcgggcggcgacgcgcgcgcggccgaacaggccgcggcgcacaaggccgagttggccgcattcgtcgccgacatcgccacgcgcctgggcctggaccagccgcaagcggtggccgaggaagcgatgctgtgcatcgaaggcatgatcgtgcgctaccagatgcagccggatgcggcggtgatcgaggcggggcggcggttgctgggccggctgcaggccggctgattggcttggggggctggccactgaggccggggactgcccaacacttccttcgtctggcttagcgccgaggcagcatccggtgcgaatagaaaatgtctcgcttctgacacattcaggctacaattctgttgtaattacgaattattcgcattcgtaatcagaattttccacttgccacgccgcgcctgcggggtagctaccttccgatccctgagtgatgtatttccacccgaccaagcaggcaaagccgcgctttgcccgccccgcgcttgtcaccccgcgcggcctttcgctgaccacccttgtattgagcctgcaggccggtggcgtgtttgcccaatccggcgaagtgcctgcgccggcaacggccagtgccgcggcagaactgccggccgtcacgatccgcgccggcagcgacgacgaaaccgccaccggcccggttcatggcttcgtggcaaaacgcagcgccaccgccaccaagaccgacaccccggtgatggagacgccccagtcgatcaccgtcatcacgcgcgaccggatggaggcgcaaggcgcgcagagcgtgcagcaggccatcggctacagcgccggcgtctatgccgggccgttcggcaacgacgcccgcggcgactggggccggttccggggcaccgagttcacgcagtaccgcgacggcctgctgaaccaggtcggcttctacaacaacgtgcggcccgatgtttacgcgctggaacgcatcgacgtgctgcgcgggccgtcgtcgatgctgttcgggcagggcgcggtcggcggcatcctgaacctggtcagcaaacgcccgcaggctgaggcggcgcgcgagatcggggtgcagttcggcaactacaaccgcaagcaggtgcaggccgacctgaccggcccgctcgatgcggacggcaagtggctgtaccggctggtggcgctggcgcgcgacagcgacacgcaggtggactacgtcaaggacaaccgctacctgatcgcgccttcgctgacgtggcgcccgagccaggacacctcgctcacgctgctggccaacttccagcgcgatgaaagcgggacctcggtcggcttcttcccctggcggggcacgctgcaggccaacccggccggccagatccccgatcacctgtttatcagcgagcccggcttcgaccgctacaacgccgagcaggcgtcggtgggctatgagttccagcacaagttcaacgacaccgtgacggtgcggcagaacctgcgctattcgcacagcacggtggactaccgcagcatctacgcggccggttttaacggcgccggccacggttgggtgccgggcagcgatacgctgatgcgccgcacggtctacctgaaccagcccacgctgaactcgttcgcggtcgatacccaggcgcagaccaacttccgcaccggcccggtccagcacacgctgctgaccggcgtcgactaccagcactcagagatcacggggcgcgccggggtggggggcacggccgcgccgctcaatgtgttcaacccggtctacggcaatttcaccctgccgggcacgcgcgacctgaaccccgccacgcaggcgcagaccggcctgtacgtgcaggatcagctgtcgtggaacaagtggctgctgatgctggggctgcgctatgactggtcgcgcgccgcgcaggacaacacgccctcggccagccgcgacgacagcgagcttaccaagcgtgctggcctgatgtaccgctcggacatcggcctcaacccgtacgtcagctattccgagtcgttccaggggctggccggcttcaacaaggccaaccaggctttcaagccgctgcgcggttcgcagtgggaggcggggatcaagtaccagccgccgggcaagaacgccacgctgaccattgccgcattcgatatgcgcgagaagaaccgcaagaccgccggcgtggtcaacggcattcccgattcagtccaggtgggcgaggcacgtacgcgcggcatcgaggttgaggcactggcctcgctgtccagccggctggacctgatcgcaacctatacctacctggatgcgcgcgtgatcgacggcacgccggccgaggtgggcaagaagctggcgagcacgccgtcgaacatggcgtcgctgtgggccaactatcgcttcaagctgtttggcgtgccgggctttgtcgccggcggcggggtgcgctatgtcggtcccagctatgacggtgccgaccagaaccgggtgggcggcgtcacgctctacgacgcgatgattgcctatgaccacggcccgctgcgcgtctcgctgaatgccagcaacctgttcgacaagcaattcctgaccacctgcctggcgcgcggtgactgctacttcggcgcgcgccgcacggtggtgggcagcgttacctatcgcttctgagccgccttgcagggaagcgcgcctgcggccggggcggcgatagcggcgcgcttactccgagtcggggattggcgctccctgcactttgggcgccggttcggcccgcatggcgtctgcgggccagagcgtcaggaaggtgcgcgcgacctcgggatcgcggcaggcgagccagtcgtcccactgttcacgcggcacgatcaccactgaccgcttttcctcgcccggcttgtgaaagcgctgcatcaccgggtgctgggccgagttgatggtcagcatggtgaaggacagcgactggtccggccagctgcgccacaggcccgcaatgccgaaggccggctcgccgggcagccagacgcgccagcgcaccggcttgccgggcgggccgccgggcgctgcatcttcgggatacgcaaactcatagaacgccgtggccggcaccaggcacagctggccctggcgccagtagcgcgcaaaggcggggcgttcgcccacggtctcgctgcgggcattggtggtgtcaaagcgccgtgcgccgggcgggatgcgcgggcgcggcaccatgccgaacgaggccagagcgccactgcgcgtgccatcgtccgcggcgcgcacgatcggcgccgcgtagtccggataggtttcagccttgtacagccccggcggcggttccacgccgaagatctcgcgcaggatccggctctggaccggggcgtagttggtgcacatgcgctgtctcctggcggcgatgcccgtatcgtcggcgccgggcggtgccgcgtcaagggtgcccggaggtgcgtcagggttcacggcagggatggcaaaaaccgtcagccgcgctggcggaatcggttattgcctgctcccgtggcgctcgcgcacactcttgcggcagccgttgcgcgccggcaccccgcgcgcagcggccacctaccaaaaggcaccagccggaatacaggagacatcatgcgcgactacgcccaagccttcgacggattttcctatgacgacgccgtggcacggcaactgcacggcagccaggaggcaatgaacgcctgcgtcgaatgctgcgaccgccacgcgctgccgggccgtatcgcgctgttctgggaagggcgagacggcaattcgcgcagctggacctttaccgagctgcaggcactgtccgcgcagtttgccggcttcctgaaggcgcagggcgtgcagccgggcgaccgcgtggcgggcctgctgccgcgcaatgcggaactgctggtgacgattctcggcacctggcgcgccggcgcggtgtaccagccgctgttcacggccttcggccccaaggccatcgagcaccggctcaatgcgtccggcgcgaaggttgtggtcaccgatggcgccaaccgccccaagctggatgacgtggatggctgtcccgccattgtcaccgtggccggcgacaagggccgcggcctggtgcgcggcgacttcagcttctgggccgaactggaacgccagccggcgtcgttcgagccggtgccgcgccggggcgacgaccccttcctgatgatgttcacctccggcaccaccggcccggccaagccgctgctggtgccgctcaaggccattgccgcgtttgccggctatatgagcgacgcggtcgacctgcgcgcggaagacgctttctggaacctggccgatccgggctgggcctatggcctgtattacgcggtcacgggcccgctggcgctgggccatcccaccaccttctacgatggcccgttcaccgtggagagcacatgccgtgtgatccgcaagtacggcatcaccaacctggccggctcgcccacggcataccggctgctgatcgccgcgggcgaggccgtgtcaggcccgctgcgcgggcggctgcgcgcggtcagcagcgcgggcgagccgctcaacccggaagtgatccgctggttcgccagcgagctgggcgtgaccatccacgaccactacggccagaccgagctgggcatggtgctgtgcaaccaccatgcgctggcgcatccggtgcgcatgggcgcggccggctttgccagccccgggcaccgcgtggtggtggtggacgatgaacagcgcgaactgccgccgggccggccgggcacgctggcgctggacctgaagcgctcgccgatgtgctggttcggcggctatcacggcacgcccaccagcgggtttgccggcggctactacctgaccggcgattccgccgagctgaatgacgacggcagcatcagcttcataggccgggccgacgacgtcatcaccacctctggctaccgcgtgggcccgttcgacgtggaaagcgcgctgatcgagcacccggccgtggtcgaggccgcggtgatcggcaagcccgatccggagcgcaccgagctgatcaaggcctttgtcgtgctggacccgcaatatcgcgccgcgccggaactggccgaggcgctgcgccagcacgtgcgtaagcgcctggccgcccatgcctacccgcgcgagatcgagttcgtcgtcgagctgcccaagacccccagcggcaaggtccagcgctttatcctgcgcaaccaggaagtggcccgcgcgcgcgaggcggccgctgcctgaggcctgagccgttcccggaccgcttcctataatgaggaagcggttgccaggccccgggggtgaaggagcctgcggcgccgcgcaaggcgcgcctgcaggcaggggcgcgcgtcttccatctccagaccaatcgggcgaggcgaacaaaatgcagagtagcgaagcggtgctgacgcaggcgcgcgcagccttggcgcatgtgccttatcagggtcatgtcctccatcccaccatccagttgcggctttccgacggcgcgctgatcctggaaggcgaggtggccgatatcgtcgacaagacccgggccgcggcgacggtgcggcgcgtggacggtgtaaccagcgtgattgatcacctgcgcgtggccaatggcggcatgcaggtaggcgacggcgaactgcgcgacgcggtgtgcgagcgcctgctcaatgccatcgatttccgcaattgcaggatctgcgcgcgcgtcaagggcaagcccgaggccatgcgcgaagccgtgggcgaacgcagcggctggattgaagtggaagtgcacgacggcgtggtcacgctgtgggggcaggtaatcagcctgtcgcacatgcgcctggcaggggtgctggcctggtggtcgcgcggttgccgctgcgtggtcaatgaactggtggtagcgcccgccgaagccgaccgcgacgacgaaatcaccgaggcactgatgctggtgctggagactgatcccttcattgatgccggccaggtcagcgcgcgcaccgagaaccgcgtggtgacgctggaaggctgcgtcgccagcgaggacacgcggcgccaggccgagcgcgacgcatggtacgtgcagggcgttgagaacgtggtcaaccacatcgccttgcgcacctgagcgctgccctgggcgcggtcactccccggtgccgcgccgtaccgcggcatcttccatgcgccagtagcgccgccgcgcccgcagcgcaaagcgggcgcgatagtctgacatcgacatgcccgtggtgcgctggaacagccgccggaacgcggcggcgtcgctgtagccgcaggcttcggcaatgccctgcgtgccgtgcagcgtgacttccagcagcatgcgtgcgcgctccacgcgcagggtgtgcaggtagtccagcgggctcagcccggtgacctggcggaaatgccgcagcagcgtgcgttcgctgaccgcggccgcctgggccaccgcggccagcttgtagggctcggacacatggtcctgcagccattggatggcgcgatacaccgggctgtcggcggtgcggctgagccagcgttgcgacaccagtgccggcacgttgcgctggcgctcgggctggaacagcatcagccgcgacgccgcctgtgccaggtccgggtcgtgcaggtggcccagcacgcgcagcatgaattccacctgcagcgccggcgccacgcacgagaacacacgctggtgcacgctcatggcctggtcgctgcccaggtcgcaatgcggatactggcgcatcatccagctctggtacatccacggcgcgccggtcctggcgccgtcgagcagccccagctgcagcggaaagaccatccccgacgaacacgccgcgatccagccgccggcctgcgcatggcgttccaccaggcgcagcgccgcggcatcgcgcttcacgatctcgcccagctgcagcgcattgctggccagcagggccgggatcaccagcagcgtgcggcggtccgcggcccgtgcgcgccgggtggaggacaccagccccggcaggtccgccgccagcgtgcgcccgttgctgccgcacagctgccagctcagcgtgggcgcggcgtcgggccgctgcaggctggcgacgccggccacggtgcggagcacgtcgagcgtggtgaacaggctgcccggcatggcttgcggcagccatagcaggcggacatgcagcgggatgttctgtgacggcggcgcgatggcggcgggcatgcctgggggcgtggtcgggtgcatggcgcgaagagttggcaggatgtcgtggcgggatcggcatccggattggcgatattgatcctcccctaaggttctggcaagggctagcatcgtgccgttgtgccgcggcgccgcccgtgcgccggggcatggcaccaacaagaccaatccgaggagattccatgccgttttccgttcgccacgttgccgttgccgccgccctgacgcttgccggggccggtaccctggccagtgccgcccagcccgatgccgcgctgctgtccgccgcgcagtcggcccagcccgcgctggtgcagtcgctcaaggagatggtgtcgatcgaatccggcagcgccaacgcgaaggggctggcgcagatggccggctataccgagaagcgcctgcaggcgctgggcgcgaaggttgaacgcatgcccgtcaccaagggtccgggcaccatggtcaaggccaccttcaccggtaccggcaagcgccgcatcatgctgattgcccacatggacacggtgtatccggacaacaccctcgccacgcagcccatccgcgaggaaggcaaccggctgtacgggccgggcattgccgacgacaagggcggcatcgccgtgatcctgcactcgctggagatcctgaagaaccagggctggcgcgactatgcgcagatcacggtgctgttcaacccggacgaggaggtcggctcggtcggctccggcgaagccatcgccgcgctggccgcgcagcacgacgtggtgctgtcgtgcgagccgaccgcggccaaggacgtggtcaaggccgagtcgctgctgctgggcgcttccggcaccgccaccgccacgatgcaggtcaagggccgagcatcccacgccggcgccgcgccggagcgcggccgcaatgcgctgctcgaactcgcccaccagctgcagcagacgcgcgacaccgccagcctggtgccgggctcgcagctgaactggacccaggcgcaggccggcacggtgcgcaaccagatcccggaaagcgctgtcgcctacggcgatgtgcgcaccaccgcggccggcgccgccgagaagctgaaggtggcgctgcaggacaaggtcaagtccggccagctggtgccggagacgcagaccacggtgacgatggaagagggccgcccgccgttcgtggccgacgcgcgcggccgcgcgctggccaagcgcgcgcaggagatctacgccgagctggacggccgcacgctggccctggccgaaggcaccggcggcgccactgacgccagctatgccgcgcgctcgggcaagcccgcggtggtggaaagcttcgggctggccggcttcggctatcacgcccgtgacgagtacatcgaactggactcgatcgtgccgcgcctgtacctgatgacccgcatcctgcaggatatcgggcgcaactgagccggcgccgccaggcctgcattgccggcgcccggttgcccctcccggcaagcctgctacagtgtcatggctgcccgcatgcggcggccatgacaaaagagaccttgcagggggagacagagatgaaccgcaaaggcttgctggacgcggccacggcactggaagacctggccgccggccgcacccccgcacccgcgcaggtggccgccggtgccgccgcgctggaaaaaatccacgccgattacccggcctggcgcgacgtgggcgatgccttgtttggcctgaaggcgctggccggcggcagcggcatggcgctggacaccaaggggcgccagcgcgccggccggctggccgatgtggtgcgcagcctgctcgaccagatctgaggggcggtgcccccgggaacccgttctacagcatcgactcgatcggcaggatcgacaggaaccagatgccaagccggcgccaccagctggtgttcggctcggtgtcgtggcggatgacttcgtcgtcgcgccgttccagccagtacagcttgccggtttcatcgagcttgacctggtaggccgcgcgcggcaccacgctggcgaaggtggattcgatccggccggccagatccgggctgtcgatgacgaagcccagttcggtgttgatcgtggccgagcgcgggtcgaaattgaacgagcccacgaagacccgggtgccgtcgacggcaaaggtcttggcgtgcaggctggagcccgagctgccaaaggggccggcgcgctcttccttcttgccgggcgcggccgagcggcgcagttcatacaggtccacgccagcttccagcagtgccttgcgccgcttggcatagcccgaatgcacggcggccacgtcggtggcttccagcgcattggtcagcacgcgcaccgccacgccgcgcctggccatgtcggcaaaataggacgtgccgcccgtcgatggcacgaagtagggcgagaccaggtcaagctcgcgctgcgggtcgcccaggatttcacgcagctggtgcgccaccagggtgtcgcgcgatgcctcgccgagagccttggccgggttgtcgctgaccatgcgcgttcttgcccactggaaccgcagcgtgccgtccagcatccgctgcacgtcaggcaggtcgcgcaccgcggccaggtaggcggcggcagcggggttctgctcgactgcgcgggcattgctgaccagcgcctgcagccgttcgacgctgaccggcggcaccagccggtccaccgggtaggccgacgcactggaccagtagcggtcgaaatcgtgcgccacgtcgccggccgcgggcccgatggcgatcacgtcgaggtcggcaaacagcacgccatcggtggcgccgaagtattcgtcgccgacattgcgcccgccgatgatggtggcgacgccgtcggcggtgaaggacttgttgtgcatgcgccggttcaggcgccggaaatcagtcaggaaattgagcgccttggggtggcggatcacgaacgggttgaatatccgcacctcgacctgcggatgcgcgtccatggccgccagccattcgtccatgccggcgatgccgttgtcgtcaagcagcaggcgcacgcgcacgccgcggtcggcggcttcatgcaacgtttccagcagcagggtgccggtcaggtcgtcgcgccagatgtagtactggacgtctagcgtgcgctgcgcggtgcgcgccagatgcacgcgcgcggcaaaggcagcgtaggcattctcgagcggatggatgccgctcaggcccggatggcgcgccacttcgccggccaccgcctggcccagcggagtggcctgggattcggcgggcgtcagcgcaaaggattcggtgcggggatccagcggcggcaaggcgcagccgccgagcagggcggcacagcacagcagcagcgaattggcacgcaggcggcggtggggggcgaacgcggcgtctgtcggcgatggcatggcgggtcctgtcgggcccctcgcggggtccgatcgttacggcaatgccgccacgttgccatgccgcgcgggccgcgggcttaattacgcaccgggagcgggaagtggtggcgcgccacggggctccggcgcatcgctcaggccagggacgatatagagacgggcgtgctctccttacgccttgaggcggcggtccgatggcgctggcaggaactggtcagtccagatgtccgccaccgtcagcggcgccttgatgccgaaggcgccgacggtttcatccagcgttgcctgcagccgtgccggcgtggccgcgccccagccgtcgcgccgggtgtcgggcgtcttcatggtgccgtcgacgatcaggcgcaggcgctcagtctccagcgcctggtcggccagcggctcgcgcgccttgaccgcggcaccgcccgcggcgggattggcaatggcgtcgagccagccgcgggtagaggccttgacgaaggccttcatcacctccggatcggatgtcatgctcttgcggttggccaccagcccgttgccgtaggacttcatgccgtagtccgagaagcggaacacggtgatcctctctggccccatgccgcgcgccttcaggttcaccaggccggtgaagaagaagtaggcggcggcatcgaagtcgcccttgacgaagcgcgtgtcgccgatatcgggcgtgacgctctcccacttcacgccgccggggtcgaaaccctgtgccctggcgaagaccgggaacagcttgcgcgaggcattgaacggctggcccaggatggacttgccggccaggtccgctggcctgacgatgccgctgcccttgcgcaccaggatcgcgttcggattcaggtcatactggatggccaccgccttgagcgcggcggacggattggtggtgttgaattcgatcatcgccgcgaggtcggccgaggcgcagtcataggcgccgcccgcgaccaggctgatggccgaggccgagccgttgccggtatcgatggtgacgtccagcccggcgtccttgtagtagccgcgctggtgcgccagcaggaaccccgcgcccgaggcttccaccttccagccgagattgaacttgaacttctgcagcgagcccgccgcgcggacatggggcaccgcgaacggggcggcggcaagcagggcggtggcgccagtggcgcgcaggaaggaacggcgacgcatgtctttctccggaacgaatgtcactggacgatgcgtgcgcgggccggtggcgcgggtgcggaaggagagcgtggcctcccaggacgccggcaccacgccgcgccggcatgcggccagggcatgcgcggggaccgtgcacatcatcgggagcaatttccgggcggcgtgccgctgaacgcttctactccgctgcggtttcagcaggatccgtgccgggcgctgcgcggcgccatgcaccaagccgttgcccggcatgcgccatcacggcgcaagccccggcgcaatcgctgcgatcccggtgcaaaaacccctggcccggaacctgcataacctcgggcaagagtagaagcgttcaccatccgcgcggcgcgtcgcagacgcacgccggatggccgggaattgctcttgaagtccgtgcctctcgccatcgcgcaggctggcacaggcgacctcaggagcgcgttgtcccggcgtgcgttgccatggtggtctgcctgtgccggcgaggggccaatccctgacccgctttgcacaaggaacaccatgagccaaccagacaccgcctacgccctggccgaactccaccgcgaatcgcgcatgggcgcgttcggttcggaaacccgccagcgcgagatccgccgcatcgacctgtccgactacgcgcggcgcaaggcgcagatcgccgacgaactgtggcaggcatcggtcgacgtcggcttcttccagatcgccaaccacggcatcgacctgaccagcgtgcgcgaagcctttgccatgaccgagcgcttcttcgcgctgcctgacgccgtcaaggcgcaatacccgctgcagaaggccaacaacgccggctgggaaagccgcgcgcaggtgcgcccctcgaccggcaccccggaccagaaggagtcctaccagatcacgcgcccgcacatggccgggctgtggcccggcgatgacgaactggaaggctttcgcgccaccatgcttgccttcgaggcgcaatgctgggaggtgggcatgaaggtgctgtcatgcttcgccggcaagctcggctttgccagcgacttcttcacgcaggcgcacgatccgcgggcgccggactaccagagcacgctgcggctgctgcactactacgcgatcccgcccgaactgcgcgacaagctggagctctggcgcgccggcgcgcatacggatttcgattgcctgacgctgctgttccagcgccccggccagggcgggctgcaggtctgccccggcaaggagatggaggcgcaggcatggaccccgatcgagccggacgaggaagtcatcacctgcaatattggcgacatgctgatgcgctggagcgacgaccggctgccgtcgaacttccaccgcgtgcgcaatcccgcgccggatgaatacatgggcccgcgctacagcatggcgttcttctgccaggccaaccgaggtgcgatgatcgaagggccgggtggcaagtatccgccgatcagcgcgggggactacctgcggcagcgggtgaatgcgaatttcaaggggtattgaggcgcggaagaatttccatgccgacggtctgctccccctctcccgcttgcgggagagggagtccacccgcagtcgctggacgcgccggtagtgagcctacgacttacgaagccgcgacaaccccgcaagcaatccgcccgcccgcattaccggtcggctgcgtcttgtagtcgtccggatccttgtgtaccaccaccgcgcggccgatcaccccgttggcgcccgtgccaacggtcaggtccggcagcagcatgctgacgcgaacgttgccgctggcgtccgcggtgacgttgttcatgtcgccggcatggtggtcgggcatggtcatctggccgtggggcttgccggtcgggttgaagtggccgcccgcgctcatcgcgtcaggcgcggagcagtcgcccttctcatggacgtggaagccgtgcacggagttgggcggcaggccggtgatcgccgcagtcatcatcacgccgccgggctgctgctggaaggtcacggtgccgccagtattgctgccgctcttgggctggagcgtggccgccgccctggcgctgctgctggcgctggtgccggacgcgctggccgcagacgaggagctcatgccggagccggcgcagccggccagtgcaatggtcgcggcgatgcaggccgccagggggggaagcacttgtttcatcggactcctcttcttgtcatgatttcggaagaaacagtataggctggccggcgccaggccgatttccggttttgtcctacatgccgcactagactgagtgcactagtgtcctgttccgtagatacggaacaggacactagccaatcacgccatcaggctgcggctgccagccgctgctgtgccgcaccaaagtgcgggtggcgcgagaacaggtccgctgcccagttgacgaacacccgcaccttggccgacaggtgccggttctgcggatacatcgccgagatcggcagttcttcggtctgccagtcggtcatgacctccaccagccggccgctggccacatagggctcggccatggcgcgcgagacccgtgccacgccgtggccttccagggcgcagcccatgtagacatcggcatcgttggtggaaatggccgacggcagcagcacctcgctgcgctccatgccgcgcgccatgggccacggcatctcacggccggtgcggttggacaggaaattgaccgccttgtgctgggccagttcggccaggtcgtgcggggtgccgaagcggttcaggtagatcggcgaggcgtagaacgccagttgtacatggccgatgcggcgggccaccatggattcctcgaccggcgtgcccacgcgcagcaccacgtccacgccttcctgcagcaggtcgatcggcttgccgttgatggtcaggtccagcttcaggtccgggtaggcctggaagaattcgtgcaggtggggcaccagcaccagctgcgccagccccgcggtggtgtccaccgacagcgtgccgcgtggcgagttgttctgccgcgtcagcgactgctcggcttcctcgacatcggccaggatgcgcacgcaccgttcgtaataggccgcgccgtcgttggtcacgctgatgcggcgcgtggtccggtgcagcagcttgacgcccaggtgggtttccaggttctggatcaggcgggtcagcgtggccttgggcaagtccatcgattccgcggcgcgcgcaaagctgccgacgtccacgacccgggtgaatgcctgcattgatacgagacggtccatgatgaggttccgacgatagatccgaacggcgtgccgcgcgcgctcgtgacgcacgtggccatgctggttgttgttgtggggagtctgccggctggctggtacagggactgcgcgctggctgggcgcgggttccggcatggatttctgatcgggcgcgcaccggcctggcagaccgccgcgcgtgccgagagccgcagtgaatcacaaaatccaagaccttgtcatgcgtggggatatgcggtttcagtggcatgacggggcggtttgcgattattccaatcccggaacagtgcattggcgatctctcgctttatcccatcctcgtcaatcaccataatccgttgcatcgcaacactcaagcgcattgtttccgccgtgcgccaacgccatgtccgagaagccaggccaacgccctgatgcagccagcgccgcctctgcccccacggcagccgggcaggggcaggtgcgcgtggccgagcatacggtgaccagtgacgggcgcgagatcctggttcgggtgtgctacccggcgggctatccggcgccgggcgccgagggcgccgcgctgctgccctggctggtgtacctgcatgccggcggcttcgtcgaaggcggcctggaacacgcatgccatctggtgcaggacctggccaccacggtgccggcggtggtggtaacgccggcgtattcgctggcgccggaccatccgttcccggcggcgccggaggacgcgcacagcacggtgcagtgggtgctgcgcaatgcccggcggctgaagctggacaagatccgctttgcgctggtgggcgaggaggccgggggcaacctggcgatcgcgctggcgcagatgctgcgcgaccgcggcaccgcgcaaccgcgcgggcaatggctgatccgcccggtgacggacccgtgcctgcagcatgcgtcctgcgcggggttcgacggcgggcaggtgccgatggacaccctgcggcgcctggccgacaactatcgcgattacctgccgacgccggcggatacggtgcatccgtatgccgccccggcgctggcctcgcgcctggccgggctgccgcccacgctggtccaggtggctgaatacgacgcgctgcgtgccgaaggcgaagccttcgccgggcgcctggccaaggccggtgtgccggcccaggccatgatcatgcccggcgcctgcggcgacggcgtggaagaggcccatgacagctgtcaggcatgggtcgacgaaggtgcgcggttcctgcggcgatgtctggccgcggccgacgatacctcatccctgactgaacgccgcgctgacgccaacgccagccggcctggagccaagcccgccggctgagccgctccagacaaccgccagccggctctgtttcggccagagccaggaccgccgcgacacgcaagcggtcctaagtccgaccatcagtttggccatggttccggtccgcccacgcggaccggcaggcggcgttcggccatttgcttttccggttgaagaaaacccgatccaggagtttgagaaatgcagcagcagaaacgacgtactttgattgccctcgccatcgtcgtggtgctgggcgccggcgtggccggctcgatcttgcgcccgtggcatggaggcgaagcccatgccaacaccccgccgcccgcgccggcgattgaagtggccgccgtggtcggccagaccatcaccgagtgggatgagttctccggacgggtcgaggccgtggagcgcgtcgagatccgcccgcgcgtcggcggcaccattgacgccgtgcacttccgcgagggcgcgctggtgaagaagggcgacccgctcttcacgattgacccgcgtccttatgccgcggaagtcgcccgtgccgacgccgcgctgggcgcggcgcaggtgcgcgccgcccatgcgcagagcgaacagacgcgcgcccagcggctgctggacgacaacgcgatctcgaagcgcgagttcgacgagcgcatcaacgcggcccgcgaaaccagtgccaacgtgcgggctgcccaggcgcagctggaaaccgcacgcctgaacctggcctacacccgcatcaccgcgccggtcgccgggcgcgtgtcgcgcgccgagatcaccgtcggcaacctggtggctgcgggcacgggctcgccggccctgaccacggtggtgtcggtgtcgccgatctatgccagtttcgagatcgacgagcagagctacctgcgctacaccgcgccgggtgccggcggtggccagcccaacctgccggtctacctgggcctggccaacgaggacggcaatccgcatgagggcaagatccagtcggtcgacaaccgcctggacccgcgcagcggcaccatccgcgtgcgcgcggtgttccagaacgaagacgggcgcctgctgccgggactgtacgccaaggtcaagctgggcggcggcgcgccgcatgcggcggtgctggtcaatgaccgcgccatcggcaccgaccagggcaagaagttcgtgctggtggtcgacaagaccaacaagctggtctaccgcgaagtggaactggggcctaaccatgacggcctgcgcgtggtgcgcaagggcctgaagccgggcgagaccatcgtcgtcaatggcctgcagcgcgtgcggccgggcgacacggtccagcccaagccggtggcgatggccttccgcagcgaactggaaccacgcggcactacgcctgaccgcaagcaggctgcgagcgagaagggcgaagccgacgtgaagccggtgagctgagtcatgcgagccgatggtttgctcccctctcccgctgaggggagagggagccggcctgagcgatgtttgattccgtcgcttatggtaaccacgtgaacccgcacacccagcgcccctagtttttttcgctcccaaagcagttgatggtgcccgccatggcgggccgccaggggagcgtttttgcagagaccaagatgaatctctctaaattttttatcgaccgccccatcttcgcgggggtgctgtcggtgctgatcttcctgattggcgccatatcgatgttcaagctaccgatctcggagtacccggaagtggtgccgccgtcggtggtggtgcgcgcgcagtttccgggcgccaaccccaaggtgattgccgagaccgtggcttcgccgctggaagagcagatcaacggcgtcgaagacatgctgtacatgtcttcgcagtccaacagcgacggcctgctcacgctgaccgtgaccttcaagctgggcaccgacccggacaaggcccagcagctggtgcagaaccgcgtctcgcaggccgagccgcgcctgccggaagacgtgcgccggctgggcatcaccacggtcaagagctcgccggacctgaccatggtggtccacctggtctcgcccaacgaccgctatgacatgacctacctgcgcaactacgcggtgatcaacgtcaaggaccggctggcgcgcctgcagggcgtgggccaggtgcagctgttcggctcgggcgactacgccatgcgcgtctggctcaatccggagaagatggccgagcgccagctcgccaccagcgacgtggtcagggccatccgcgagcagaacgtgcaggtggcggccggcgtgatcggccagtcgccggcgctgccgggcgcggacctgcagctgtcggtcaatgcgcagggccgcctgagcacggtggaggagttcgccgatatcgtcgtgcgcacttccgcagacggtgccgtcacgtacctgaaggacgttgcccgcatcgagctgggcgcgtctgagtacgcactgcgctcgctgctggacaacaagccggccgtggccattcccatcttccaggcgccgggctccaacgccatccagatctcggatgacgtgcgcaagaccatggaagagctcaagcagaacttcccggacggcatcgactacagcatcgtctatgaccccacgcagttcgtgcgccactccatcgaggcggtgacgcatacgctgttcgaggccatcgcgctggtggtgctggtggtgatcctgttcctgcagacctggcgcgcgtcgatcatcccgctgctggcggtgccggtgtcgatcgtcggtaccttcgggctgatgcatgcgttcggcttctcgatcaacgcgctgtcgctgttcgggctggtgctggccatcggtatcgtggtcgatgatgcgatcgtggtggtggaaaacgtcgagcgcaatatcgaagaggggctgacgccgaaggaggccacctacaaggccatgcgcgaagtcagcggccccatcatcgccatcgcgctgacgctgatcgccgtgttcgtgccgctggccttcatgacgggcctgaccggccagttctacaagcagttcgcgctgaccatctcgatctcgaccatcatctcggcgttcaactcgctgacgctgtcgccggcgctgtcggcactgctgctcaggagccatgacgcgcccaaggactggttgtcgcgctggatggaccgcgtgttcggcggtttcttcaagcgcttcaaccgcttcttcggccgcagcgctgaaagctatggccgtggggtgaagggcgtgatccgccgcaagggctcggtattcggggtctacgcggtgatgctggcgctgacctggggcgtgttccagctggtgcccaagggctttgtgccggcgcaggacaagcagtacctggtgggctttgccaagctgccggacggcgccacgctggaccgcaccgaggacgtgatccgcaagatgagcgatatcgcgctcaagcatccgggcgtggaatcggcggtggccttcccgggcctgtcgatcaacggcttcaccaacagccccagcgccggcatcgtcttcgccacgctcaagccgttcgaggagcgcaagaccaaggagctgtccggcgcggcgatcgcggccgacctgaaccagaagtacgcggccgttcaggatgcctttatcgcggtgttcccgccgccgcctgtgcagggcctgggcaccatcggcggtttcaagctgatgatcgaggatcgtgcggcgctgggctatgacgcgctgttcgaggccaccaacgcgtttgccaacaaggcgcgcgccacgcccgagctgactggcatcttcagcaactaccaggtcaacgtgccgcagctcgacgtcaagctggaccgcgtcaaggccaagcagctgggcgtgccggtgaccgaggtgttcgacacgctgcagacctacctcggctcggcctatgtcaacgacttcaacaagttcggccggacctaccaggtcaaggtgcaggcagacgcgccgttccgcgcccatgccgaggacatcctgcagctgaagacgcgcaacgccgccggcgacatggtgccgctgtcgtcgctggtgcaggtcaagcagggctttggtccggacagcgtggtgcgctacaacggctttaccgccgccgacatgaacggcgggcccgcgcccgggttctcgtcgggccaggcccaggccgcggccgagcgcattgccgccgagaccctgcccaagggcatgaagttcgaatggaccgagctgacctaccaggacatcctggccggcaatgcgggggtgtggatcttcccgctgtgcgtgctgctggtgttcctggtgctggctgcccagtacgaaagcctgacgctgccgctggcggtgatcctgatcgtgccgatgagcctgctggcggcgatgaccggggtgtggctgacgcagggcgacaacaacatcttcacgcagatcggcttcatcgtgctggtgggcttgtcagcgaagaacgcgatcctgatcgtggagtttgcgcgcgaactggagcatcacggccgcaccgtggtgcaggccgcgatcgaagccagccgcctgcgcctgcgcccgatcctgatgacctcgttcgctttcatcatgggcgtggtgccgctggtgatctccaccggcgccggctccgagatgcgccatgccatgggcgtggcagtgttcgcgggcatgctcggcgtgaccttcttcgggctgttcctgacgccggtgttctatgtggcgctgcgcctgctggctacgcgcggccagcgccgcgcggccacgcaagagcagggcgcgcaactgacggcatcggctgaataatggtgatcaacatgaatgcccctgcattttcgacaacaaattggctgcctaagctggcgaccctggcggcagcgctgatccttgcgggctgctcgctggccccgacctacaaggtgcccgaaacggccaccgtgccggccttcaaggaggccgaggccgcccaggccgaaggcgcgcaatggaagaccgcgacgccggccgaaggccagcatcgcggcgactggtggaagatctttggcgatgccgaactggaccgcctgatcgacgcggctggcagctccaaccaggatctggcgattgccgctgcccgcctgaagcaggcgcgggccttcacgggtgccactgaggcggacctgtacccgcaactgagcgtggggctggacccgacacgcgcgcagccgtcggcggcctcgcaaggcttgcctgacggcacgcgggtgccgccgcagacggtgctgaaggcgcgcgcgttcgccagctatgagctcgacctgttcggccgcgtcgcgtccagcgtcaacgccgcccgggctgaaggcgaggccgcggaggacctgtaccgctcggtgcagctggcgctgcaggccgacgtggcgcaggcgtacttcgcgctgcgcacgctggacagcgagcgcgacctgctcaatgccaccatcaaactgcgcgaggatgcgctgtcattgctgaagaagcgctatgacgccggcgagaccaccgacctggatcccgcccgtgccgaagctgaactcggcaccgcgcgcgcggacctggccggcatcgaacgccgccgtgccaaccaggagcatgcgctggcggtgctgaccggcgtgccgccggcggcattctcgctgccggcgcgcccgttcgacgcggcgccgatcgcgattcccgccgggttgccgtccgagctgctggagcgccgccccgacatcgccgcggcggaacgccagatggccgcggccaacgcgcgcatcggcgtggccaaggcggcgttcttcccgcgcatcacgctgacggggctgttcggctttgaatcggcggacctgtcgaacctgttcaagtggtcgtcgcgcacctgggcgctggggccgctgatcggctccaccatcgcacagaccgtgttcgatggcggccgcaacagcgccaacctcgccggtgcccgtgccgcgcacgaggaatccgtggccggctaccggcagaccgtgctggtggcgttccgcgaggtggaagacagcctggcggacgtgcgctggctcagccagcaggccggcgcgctggacggcgcacttggcggcgcccggcgcgcggcgcggatctcgcgtagccgctacgatgccggcgcggtcgattacctgacggtgatcgatgccgaccgtaccgtgctgcagtcgcagcgcgaggccaaccaggtggccggcctgcgcgctgcggcaacggtgtcgctgatccgccggctgggcggcggctggggcccgctgccggagacggtggcggccgtgccggcgccggcggccgagggcgcgccggcatcccaggcccgctaagcagcgcgggactggcgcgatgcttcccagtcactacactggaagcatcgcgccatgcgtacaggatgcacgggggcgccccggatgcatcctgtcccgccgccatgcttgttcgacacaggaaaccgttctggggactgatcttcgccgcgatcaccgtaggcatgctgctggcgccgctgccatggtccgaccgcaccgccatccatgacgaggtggtgattgcgcgcccgccagcgcaggtgttcgactacgtgtccacgccgctgcactggcccaagtggcatccggcctcgctcggcgtggcgggagcgaccgaccatccgctggggcagggcgagcgcgtgaccgagaccttcatggtggcgcagcgcggtggcgcggtggtctggaccgtcatcgaaagccagcggccgcgcacatggtcgatcgaaggcgtggccgaagggcgcagggtcggcaccatcacctaccggcttacgcccgccatgacgccgtcgctgaccccgtcggccgaacgcacgcgcattgagcgggaattccgctaccggtcgcctacgctgctctttgccctgatcaaccgcctgacgctgcgcgagcgcgtccaggccgagtccaccgaagccgtgcgccggctcaaggcgctgctggagacgcagccgccatagcgcgcggcgacgccttgcgtgggacaccgatccggcctaagttggagccatccctcagtgcgtccagcgaggcccgtatgccgttccagctgcaatcgaccgcattcgccccgggtggcgagattcccgcagagcacacctgcgaaggcgccgatatttccccgccgcttgcctggaccggcctgccgcccggcacggccagcctggcgctgatcgtcgacgaccccgacgcacccgaccccgccgcgccgaaaatgacctgggtccactggctgctctataacctgccgtcccatgccgaggcgctgccggcggatatcggcaaggccgggctgcccgcgggcacgcgcgacgggctgaacgactggcaccgcgctggttatggcggcccgtgtccgccgatcggccggcaccgctacttcttcaagctgtatgcgctggacgtggcgttgccggacctggggatgcctgacaaggaggcgctggagcgggcgatgcggggccatatcctggccaccgcagagttgatcggcacttaccagaagctgcagcgctaggcgcggtgcggccggaggctacgtcatgtcgtaccgaatgctccgccttgatgttcgttggccgtggtggcggctggcggcggccggggcgctgtcactgctggccgtggccggcccgctgcgtgcccagccgcatgaatccggcccgatcaccatcggcggttcggcgcaggtgcaggggccgctgacggtgcacggcaagctggttgtcgccggccacgtctatgccagcggcccgctcaccgccgcgtatttcaccgggccagccaccgcacgggggctgccgtacggcggcggctatctcaaggtcttcaacggcccggtgacggtgcatggcgacatggtggtcaggggcgacctgagcgtggccggcccgctgaccgtggacggccccattgccgccagcggcggcatcgatgccgacgggcccatgcgcgagcgcgaatacgggcgctgacagcgcgcaccggcgccacgcaatgccggcattgcctgccggtgttgcacaataccggctttgcaattcttgcatcgaccggggacaccgcatggcaaagcagggcgcaatggggctgagaggtatcgcattgttcgaggccgccaagggcttgctggtgatcgtggccggcctgggcctggccgcactgctgcaccgcgacgcccaggcgctcgcggaagccatcatccagcgcctgcatgtcaatccggccagccgctatcccaccatcttcctgtccttgcttgcgcatcccgacaacgcccgcctgtgggcaatcggcggctctgccgtggtctatacgctgatgcgctttgccgaagcgtacgggctctggcgcgggcttgcatggggcaactggatcggggtgtggtccggcggcatctacattccgctggaactgtacgaggccctggtccaccccagctggctgcatggcacgctggcggcagccaacctgctggtggtgctttacctggcgcgggggctgctggcgaagtcgaccaccagggggtcgtgatccgatgaacggtaggggccgggcgcgtagtggcccggcaccgcaggcgcacccggcgccggggcgtaggagaaggccggaggctcgtcggcattgatatgccaggcatgcacggccatgacatggcgggccgcggcggcatcggcaagcacatgatcgagatagcccgcctggccgttgtagacgtagctgtatgccggcttcccggcgaattccgcgaccatgtcggcatagccgcggcgcgccagcacgcgcacggggtcttccatggcatagctgttcaggtcgccgatcaccagcacgcccgcgccggccacgcccgtcggcgttgtgcccagccattcggccagcgcctgggctgcctgcacgcgcgcgggattccagcaaccctggccatcaccctggtcggcttgcgcgccggtggcctcggtgcacgtcttggacttgaaatgattgaccacgaccgtgaccggcgtgccgccagccgccgcgcggaaggtgccggccagcggctggcggctgcgctcgcccagccaggtggtggccgtgcgcccggcgggcacggcggtgcgggcgttgtacagcaggccgacagcgatggcattgctgccaagcgccggcgtgccgggatcgagcacgcgccagtccggccccagccgcgtggccagctggcggatcgcgctgtactggccgtagccgtcgttttctacctccatcacgccgatcacgtccgcatccagtccccgcagcgcggcgagcagcctggcttcctggcgtgccagcgccgcggcgtcctgcgcgccgcggttgccgggggcatcgaaaccgccgccctggccgtcaccattgaagtagttctgcaggttgaaggcggccacgcgcagcgtggtggccggatgccgcggcggggcaccgcggcgcgggttggtggcctggaataccggcgcgctcgctccgggcaccggctgcaggcgccactgcccgtggcgtttttccagcaccccctgcacgccgctgaccgtgtctccggcccgcaccgggtggtccgcggccaggcgcggtggcgggtagggcaccacggcgggatactgccgcgtcgagccatcgtcaagcaacagccggttgcgggcgttggcggcggcggcttgccgcgcggccgttcccggcagtgcctgttgcgtcggcgcgatgggccggccgtcgctcagcgccagagtgccatagcgaccaagctcatgggtatcggcaaccgtcagcgtctggggcaggcgcaccagcatgccttcacgcgcggcaagatcggattcgcccgcgaccggcaaggccagcgtctgcggcgtcaccgccatgctgcgtgcgcacaccgccagcgcaccggacagcaccagctgcgtctgcccgaatttctcttcgacccttccggacacgcgcaccatgtcgccggcgcgcgccgtggtgcgtggcgcgtaagcaaacaggccttccgacacgccgggccggtgcaggcgttgcgcgtccgcggtctgcaggaagaagccgcgcaggctgccatcgccgctgaaggccgcggtgacgactgcctctacctccaccacgctgcccgcgagcggcgacgccgccgcggcaccctggatctcggcgatcgacgtcgccggcgtgccgcatggttgcgatgcagcatgcgcgcccgccaggcaggtcaaggcgagggcgggcaagacggcccgggcgaggtggcgcttgcgcagggacattcgcatggtgttatcggcaggtagtggcagggtggacgatgctaaccgccgcgtgtaacggaatgcttgcagcaggcatgtggccccgcgatcgtgctaaggtagcagacacccgccggtgccccggcatctactccattggtaaaaccgtcatgatcaaggaaatcgcacaactcaccatcaagcccggcatggacaagcaactggagcagggcgtgagccaggccacgccgctgttcctgcgctcgcgcggctgccacggcgtgcagctgttccgctcgatcgagcagccggaacaatacacgctagtggtggaatgggagacggtggacgaccatatggtccatttccgcgaatcgcccgagttccagcaatggcgcgccctggtcggtgaaacctttgccgcgccgcctgacgtgcaccacgtggccaaggtcctgtaagcgcacgccatgagcacccggccggaacgtccccgccatttctcgatgctgcgcgagctgcagctggccgatgtctttacgctgggcaatgcggcctgcggcatggggtcggtgttcttcgccatgttctacgtggccgaccagcagttgtcgcatttctacacggcggcggcattggcgccgctggcctttattttcgacgtgcttgacggccgcatcgcgcgctggcgccatgcgcattcggcgctggggcgcgaactggattcgctggccgacgtgatctcgttcggcgtcgggccggccacgctggcctttgccgccggcatgcgcggcggctgggacctggccgtgctgatctactttgtctgctgcggtgtcagccggctggcgcgcttcaacgtcaccgccgaatccctggccgagggcagcgacagcggcaaggtcgcctacttcgaaggcacgccgatcccgaccagcgtgctgctgaccgcggtgctggcatggtgcgcctggcaaggccagcttggcggcgaactgccgggcggcgcgtgggtgctgggcccggcggtgctgcatccgctggtgctgctgttcgcgctgtcgggcacgctgatggtcagcaagacgctgcgcattcccaagttctgagccgccggcggcttcgcttctggcggccccttgctgcgggcctcaggcaggcgccgcatttcccgcctcgggacctgctggccgcgtgatgacctgcccgtcgcgggccccgctgtgcgcgccgtgctgccaggtaatggtgccgttgacgatcacggtgtcgatgccttcggctggccgggtgggggtttcgtaactggcggcatcgcgcacgttggccgcatcgaaaacgacgatgtcggcatggttgcccacggtaagcgtgccgcgccggtgcaggccgaagttgcgcgccgtcagtccggtcattttccagaccgccgtctccagcgggaacaggccgacctcgcggcagtagtgccccagtacgcgcgggaaggtgccccacaggcgcggatgcgggctggcgccgacggggatgccgtcggagccgatcatggtttcgtcgaaggcaaggatgcgctggacatcgtcctcgtccatctggaagtagatcgcggtgcccggctgcaggcggcgcgcggcttcgtccttgggcacgccccattccctggcgatgtcgtcgagatcgcggcccgcgcattcggggtgcggttcgctggcggcgatcagcacccggccgtcgagcatgccgcggtcagtgcggatcatggtggagccggccgtgtacgggtagcagtcgagcgacacgcactggtgcttcatggcctcgcggataaagggcagggttacctggctcttgccaaaattggcctgcctctgcaccttgtggtgcgacaccaccaccggcacgtcgagctctcggccgatgcggaaggtctcgtcgagcgaggccatgacgtggtcggactcgtcgcgcatatgggtgacgtagagcgccttgcgcacactgagcggccggcagacttcgatgatctcctcggtcgtcgccatggcggcgggcgggtagaaggtgccggtcgacaggccgatcgcgccggcctgcatggcctcctcgaccagcgcctgcatggcggcgatctccttggcatcggctggccggtccagcgccgccatggtgaccgcgcgcaaggtcgaatgcccgaccatggcggctacattgaccgagctcggcatggtacgcagcgcgtcgaggtaggcggcgaaggtggtgaagcggccttgcgccggtgtgtcgatcaggctcagcggcatcggcagatccatgtcggcgcgcagcggcgcggcgctgatgccgcagttgccggcgatcacggtggtgacgccctgcgagactttgaacggcatggtgggttgcgacagcaccgcctggtcatcatgcgtgtgcgcgtcgatgaagcctggggcgacgatcaggtccgttgcatccagcacgcggtcggccgtgtgcccggcgaggtcgccgatcgcagcgatgcagccgtcgcgcacgccgatatcggcgctgaagcggggtgccttgctgccatcgatcacggtgccgccggcgatcagcaggtcatagtgcggggcgtgtgcagaggtggggtcggacatgggattcctttcctggactggagcgtggcggtcagcggaaatggcaggccacgtggtggatgccggtggcggagggacgttcggtcagcaagggggcctgctccttgcagcgggcttgcgcatgcgggcagcgcgtgtggaagcggcagcctgccggcggattggccgggctgggcggatcgccctgcagcagcaggcgccgcgcgggcctgcgcgggtcgggcaccggcacggcggacagcaggatctcggtataggggtggcgcggcgccgagaacaaggtgtcgcggtcggccagttcgacgatctggccgaggtacatcacggcgacccggtggctgatatggcgcaccacggccaggtcgtgcgcgacgaacaggtaggcgatgccgaactcggcctgcaggtccatcagcaggttgaccacctgcgcctggacggaaacatcgagcgccgataccggctcgtcgcagacgatcagcttcgggttgagtgccagcgcgcgcgcgatgcccagccgctggcgctggccgccggagaactcgtgcgggaacttgcgcacggcttcgggccgcaggccgaccttgctgaacagccattgcacgcgctcgttgcgctcggcacgcgactgcaggccgaagttgcgcagcggctcgcccacgatctcgcccgccgtcagccgcgggctgagcgaggcataggggtcctggaagatgatctgcaggtcgcgccggcgctgccgcatggcgcttgccggcaggcccagcagttcctcgccgtcgagctgcaccgagcctgaagtcggctcgatcaggcgcagcaccgacttggcagtagtggtcttgccgcagccggattcgccgaccagcgatagcgtctcgccgtgctccacggtgaaggacacgccgtccacagcctggatcggcgggctgcccggtgccagccagcgccgcggtgcgaggtagtgtttcttcaggcggtcgaccttgagcaggggcgctggcgtggcggagattgtgctcatgcgatggcttcctgggcttgcgggttgcattcgatgcggccttcctcgacggcgaagcaggccaccgcatggtcgccaccgtggcgtgtgagctgcggcagctcgcgcgcgcagcgcgcgttggcatgcgcgcagcgtgccgcgaaggcacaaccgcgccgcgcttcctgtggcgagggcaccaggccggggatttcggccaggcggcggctgctggtgttcatcgacggtatcgatgccatcagcgcgcgggagtaggggtgcagcgggcggtcgaacaactcagtgacgctggcttcctcgaccttgagcccggcgtacatcacgatcacgcggtcgcagcattcggccaccacgcccaggtcgtgcgtgatcatcaccacgcccatgcccagttcctgctgcaggcggcggatcaggtccaggatctgcgcctggatggtcacgtcgagcgccgtggtgggttcgtcggcgatcagcacctcgggattgcaggccagcgccagcgcgatcatcacgcgctggcgcatgccgcccgaaagctggtgcggatactcgttgacgcggcgttcgggctctgggatctgcaccagccgcagcatttccaccgcgcgcctgagcgcctcggagcggctcgcgccctggtgcagctgcacggtttcgccaatctggcggccaatcgtcagcaccgggttcagcgaggtcatcggttcctggaagatcatcgagacgcgattgccgcggatgcggcgcatctcgcgttcgctgagctgcaacaggtccgtgccgcgcagccgcacagcgccgcggatgcgtgccggcggcgtgggcagcagccgcatgatggacagcgccgtcacgctcttgccgcagcctgactcgcccaccacgcccagcgtctggccggcacgcacggtgtacgagacgccgttgaccgagcgggccggcccggtgagcgtgtcgaaatgcgtatggaggtcctccacttcgagcagcggctcgcccgtggccggcctgacatgggacatcgcgcgcgacatcgtgatggtcatggttgcgctcccggattcagagttgccgcgccaggcgcggatcgagcgcgtcgcgcaggccgtcgccgagcaggttgatggccagcaccgtcgcggccagcaggatgcccgggtacaggatgatgtggaaggccacggccacgaaattgcgcccctcggccatcatgttgccccagctcggcatctgggccggcacgccgacgccgaggaacgacagcgcggcttccgtgagcacggcggtggcggccacgaaagtggcctgcacgatcagcggcgccaccatattgggcaccacgtggcgcatcaggatcaccggcaggcgggtgccgaccgcatgcgccgcctcgacgtagagctgctcgcgcagggtcagcgccagcgagcgcaccagccgcaccacgcgggggacctcgggtatggcgatggcgatgatcaccgcgcccaggctggcctgcgtaacggccatcagcgcgatcgccagcaggatgcccgggattgccatcaggccgtccatcacgcgcatcaccagggagtccgcccggcgcacgaagcctgcgaccaggcccagcagcacgccggacacggttgccagcagcccgaccgacaggcccacgatcatggagacgcggccgccccagaccgcgcggctgaatacgtcgcggccgagcgcgtcggtgccgaaccagtgctcggccgatggcggctgcatgcgcgccagcgggtcgatgtcctgcgggtcgacggtggcaatccagggcgcgccgagggagagcacggcgatcaccgccagcagcagcgcgcccaagatcagcgtggggtgcttgcgcgcctagtgccagcgcggcagcacgaaaggcgcatggtcgggtgccggtacggcaggttcggtcgcgggcagggaagtggtcatgtcagcagtgtctcgcggcgaaagccatcagtacttgatgcgcggatcgaacagccggtagctgaggtcgatcatcaggttgatcagcacgtagaccccggcggagaccagcagcacgctctggatcaccgggtagtcgtggcgctgcaccgagtcgaccaccaggcggccgacacccgggatcgcaaacacggtctcggtcacgaccacgccgccgatcagcagcgcgatgcccatgccgacggtggtggcgatcgggatcgccgcgttgcgcagcgcgtggcccagcaccggcagcacgcccaggcccttggcgcgcgcagtgcggatgtagtcctcatgcagcacttccagcacggtggcgcgcgtcatgcgcgtcaccagcgcgatatagaccagcgccaggttgacgcagggcagcaccaggctgcgcagccatgcgccggcgccgtcggcgaggcgcgcatagccctgcaccgggaaccacggcaactggatggcaaaggcgtagaccagcaggtagcccaccaggaacaccggcagcgagaatgccagcaccgcgaacagcattaccagccggtcgacccagctgccggcgcggtacgcggccagcgttcccagtggcaccgcgaccagcaaggtcagcagcatggtcagcgcggcgacagagacggtcggctccagccgctgtgccagcaactgcgccaccggcacctgggtgaagatggaggtgccgaggtcgccggtggcgagccggccgagccacagcaagaactgccgccacagcggctggtccagccccagcacgccgcgcagcctggcgatgtcgtcaacggtcgcgaggtcgcctgcgatcagcgccgccggatcgcccggcgacaagtggatcagcaggaagaccaccacggccaccactgccatcacgggcagcgtcgcggccaggcgtctgagcaggtagcccattgtcgtgtttcccccggtggttcgtgcttcgtggttatttgtcgagcatccagaccgtgggcatgccggcccacatcttgtcgatgcccttgaggctggcacgcgccgcgaacgccgacgagtactggccggcgttcacatagggcaccgcctcataggcgcgcttctggaaggcatcgagcagttccttgcgcttggcgggcacggtctcgcggacccaggccgtgcgcagtgcgtcgagcggcttgtcgcagggccagccgggcaggctggtgccgcagggggcgctgaggtaggcattggtgatcggggaatcggcatcgaactcgcccgcgacggtcacgtacatattccagcccccggcctcgggcgcatcccgcttggcgcggcgcgcgccgatggaggcccagtccatgttctgcatgtcgacgttcatgcccatgctgcgcatggtctgtgccgccatcagggcttcagcgttgagctggggaatgtcggtcggcaccagcagcaccaccttttcgcccttgtagcccgccgcacccagcaactgcctggcacgcgccggatcggccttgcggtacggttcggcgccggcagcggtatcattggggccgccgcagatgaagaaggtggcgcagtagttgatgcgcatgtcgagcggatagcccatggccgcggtgaagcgttcctggctgaccgcctgcaggaaggcctggcgcactttcgggttgttgaatggcggatgcagctggttcatcaccagcacgccctggtaggcgccgcccgagccgatcttgatgctggcgtcgccgcgcagcggggtgatgtagtccggcggtacctgttcgatcaggtcgacctcgccgcgcttgagcgccgcgatggcgctgttggcgtccggcaggtagagccattcgacgcggtccacgcggggctgcttgctgccggcgaggccgctcgcgggctcgctgcgtgccacgtagtgcgggttgcgcacgaacaccgccttgttgcccggcacccattcgtcgcgcttgaagatgaaggggccggagcccagcacctcgggcagcggcgcggtggcgggcatcctggccaggcgctccggcaggatcaccgggggatagcccgagggcttggccagcgcatcgagcaccatgccaaagggctccttgagcgtcagcgtgaacgtgcgcgcgtcgaccgccttccactcggcgccggcttcgcccatggctcggcccaggctgtcgcgcgcgccccagcgctgcagcgaggcgatcgcgtcggccgaggtaaccgcgctgccatccgagaacttcaggccgggacgcagcgtgaagctccactgccggccatccttcgagctgctgtacttctcgaccatctgtggttgcggcttgcccctggcgtcctgcgcgaacagcgtgtcgtagaccatgtagccgaagttgcgcgtgatgtaggccgtggtgaaggtcggatcgaggatcttcaggtcggcatgcgccacgaccttgagcgtcttggtctgtgccagcacgggaaggctggcgcctgccaggaccagggcgcccgccgcgagcgcggcggacagggatcggtttggtgtcatgtgcagtctccgctttcttcgttgtcgttgttgtcgtgatcgcagccaggcggccggcgctcaggccgcggcgctgtccaggggccacttgggccgctggatcttgcgatagggcagggtcgtgaggtcaagcgtgacggcccccggggcgcctgcgtagatcacgtgccttgccactttcgagaaggacgcgtagaagtgctgcgaggacttgaccacgatgatctgcttgcgcgccaggtcacagcccagctgggtgaacatgtccgtgcccatggcctggttgcgcagcgtgttcagcacgatgtcgatgccgttggcttccaccagcgcgcagtcgcccatcggcaccggcgcgtcggacagcccggtcatcaccatgtcgggcagcagagccttgaccgtgcagtccagatccaacgggtcgcccgatagcggactgatcttgccgccgatgcgcatccgcaggcgtgcgcccacgccggcatcgaaggcgatgcgcaccgcgatcgggtcccacatcgggccgaccgccgcattgccgatgccgcgctcgatcatgcgacgcaggacaaaggtggagtcgctggctgcgccgccgccgggattgtcggcgccgtcggccagcaccactggcccgccgtcgcaggccagcgcctcgtcaagcgaggtgtcgatgtccgggtagcgcaccgtgagcccgtcgcgcatggcgatcagttcgtcggcgagttgccgcgccagcgcatcggccctggcctggttgccatcgacgtagaccaggaccttggtgcccatcgccggcacatcgccccatgaaaacccatgcgccagcgagatcgacagcacgccgtcgcgcccttccagcgactggatgcggtcgatgaagccgcgcgccggctcgcgcgaggtgtggaccgtgacgatcatgctgcaatcgaccaccgccgccaccgggcgaaccttgcctgccaccgtggccgcgcacaggtcgaccagttccagcgcgcgttccagcacgtcggtatgcgggtattccttgaaggcgaccatcacgtcggcgtatgccgtcatctcgggcgtcaggtggcagtgcgggtccagctccgcgccgatcaccacgtccgggccgacgatggcgcgcacacgctgcagcaggtcgccctcgcagtcgtcatagccatcggccaccatcgcgccgtgcaggccgagcagcaccatgtccaccggcagcgccgcgcgcaggtcggccaatagttcctcgcgcagggtttcgtaggcatggcgggtggtggtgccgctgggctgcgcgccggcgaccatgccttcgcacagctgccagccgcgctccttgccgcggatccgtgcagcccacagcggccctgagaaaaacgtcatctggtcaggatgctggccggccgcgaagtagccgcgatccctgaaggacgccaggccggtgggcatcggcgcaaaggtgttggtttcggtagcgagggaggcactgaagacacgcacgatggttggctcctggtcagtcggggattagcggttgggggaaagcgcgattcaggccgaagcggccaggcggcgcaggcgcgccggcccaagcatcccggcgctcaggccgaacgaagcaggatgcgccggcaccggcaggccgcgcgccagcgcggcacaggtctcgcccatggccgccgaggtctggatgccgtagccgccctggcccgccacccagaagaagcccggcacggcgtcgtcgaacccgcccaccaggtcaccgtcggcgacgaaggagcgcagcccggcccaggtgcgcgcagggcggcggatcctgagcgaggtcgcggtctcgatgcggtcgatggcaagcgcgatatccatttcctcgggctggacgtcctgtggctcgaccgggtcggcattggccggggagcccagcaacatgccggcatcgggcttgatgtaccagtcctcgtcggcgccgaagaccatgggccagccgctggtgtccatatccgcgggcggagcaaagacgaaggcagagcggcggcggggttcaatccccagcggctgcacgccggccagccgcgcgatgacgtcggcccaggcgccggcggcgttgagtaccaccggtgccgcatataccgccccgccagcctccacgcgccagtggtcccgcacgcgtgccatggccgtgacttcggcatcgcacaccagcttgccgccggcctggcgcatgccgcgcaggtagccctggtggatcgcgtccacatccatgtccgcggcgccgggctcataaacgccgccgatcacttgctccgcgcgcagcgctggtacgcgctcgcacgcttgcgcggcactcagcaggcgggcgtcgggatcgacggcgcgcaccacgtcccagtgcgcgtcaagcaaatgctgttgcccggggccggcgaccatcagcgcgccgcgcggcgtgagcagcgggtgcgaggcaaaacccggcggcggatcctgcaggaaggcgcggcttgccatcgtcagcgcgcggacctgcgtggtgccgtagctttccatgaacaacgccgccgagcggccggtcgagtggtagccaggctgggcttcgcgttcgagcaggatgacgcggccatggggcgcgagccagtacgcgacggaagcaccggcaatgccgcctccgatgatgagatagtcggctcgaatcggtgaggcagcgtgagtcgggtgcatggatcaggtggcaggagagcgcctgcggggcgctcatgcattcggaatgggagtgagtgtaggcaagaatttgcgtatatgcaaattgcggatacgcaaatcttgcgctaaggtgggcggcaaggggataagccttggcgcggtctgctctgttagcattccgtccaacggaaaaaaggacgcaggcttgaaaccacacaccgcccaggggcgcggcagcggcatcgggaccgatgacggcgagtcgcgcacgctcgaccgtgaaacctttggcaagcgcctgcgcgcggcgcgcaaggcctttggctggacgctggcgcacctcgccgaactgtcgggagtctcgatcaccaccatctcgcgtgcggagcgcgggcaactggcgctgggctacgagaattttgccgcgctgggccaggcgctgcagatggacatgggctcgatgttcgcgggtgccggcacgaagacgtcaccgttccaggggccggtcgtgacccgggccggcgcgggcgtgacctaccggggatcgtcgctgacctatgagtttcttggcacagaggccgtcggcaagcagatgagcccggtggtcggcaccgtgcatgcgcgccgcatcgagggccccggtgacttctcgcgccatcccggcgaggagtttgtctatgtgctcagcggcgagatcgaaatccatttcgacaacggcgagaagctgcacctggcgcggggcgatgcgttgtatttcgatgcccgcatgggccacgcctacatcagcgtaagccggcagctcgcccggatcgtgggtgtgaccaccagcgaaagcaacttgatgaagtcggcccaggcggcgaagccggaggccgtgccaaaacgggccgtcgggcgcacgcaggggaaagccgccgcgaccaggggcaagggcaaaggctgaagggggcggaacccgcgctttcaggttccgaggtgaaacattgcttgcggagccccgtgtggccgtggatacggcatggggtcggtgttcttcgccatattcttcgtggccgaccagcagctgtcgcatttctttacggcggcggcgcggcttgcatgccgttgcgagcaggctgtccctggtgaattcggttttttttgaattctggcttcatttttcttgaagagcaaaatcagaatcgcctgatttattttttcggcagcaccatttttactatccatcttgagttgcagcgccgtcattcaatgaccgccgcagcgatagcgtgccgcgagacgcagcgtatccagtcactagtttgtttcggcacgaaagcgttcaactccacggagtgcttcgcatgggtagccgattaccgttttcctcccgtaccgttaccgtatccggtgatgggttgccggaactattgggacagccgctgctagtattttccaggctgtccggcaccgagggtatcaattcgctgttcgagtatgagctggaactcaagacgccggacgaccgcaatgtcctgtacggtccggcgggcgatttcgacctggaagccatgcaaggcaaggagctgacagtcagtatcgaactggacggctccggcagcggcctggacggcggcctcggcaggggcaagcgcgagataacagggatcgtcaccgatgtgcgcggcccttaccacgaaaacgagcgcattcgctatcgcctgaccttgcgcccctggttttggctcggcacgctcacctccaccttcaagcggttccagaacatgaatgtcctggaaatcgtggaagtggtgctgagcagatatacatttccggtcgagcgccggctttcactcatcgagtatcccaagcgccagtatcaattgcaggccggcgagaccgactaccagttcgtgcgccggctgctcgcagagtggggcctgaatttccattgggagcacacgaacggccatcaccgcatggtgctgacggatggcaatggcgccttccagaacatccccagccccgcgtatcacaccatcaactggtatccatcctcggaccgggtggacgaagaacacctccaccaattcgaggtacgcgattgcctgattacaggctcgtgggcgcacggggattacgactacaaccagccccgcgccgacctgaatgtctccgttgacgacccccgcgagaccagccatgccacctatgaactgtacagctggccaggcgattacgttcagcccaagtccggcaatgacgcccgcaaggaaggcgacatgctggcgcgcatcaatatggaacgcctgcggcaacacggcgtgcgggtgcgcggccagggcaacgtgcgcgcaatggcgccgggccacacctttacgctgaagcgcttcctgcgtgctaaggccaaccgcgagtacctgattttcgctacgcgcctgctaatcgaggacgtgggcgagttcgcgggtagcgaccagcaatggcgctgcgaggtggaattcgaagcccagcccaccagcgaaatcttccggcccgagtcggtcaagaagccttacatcggcgggcatcacatcgccagggtcgtcggcccggccaatcaggaaatctggagcgatgatctgggacgggtgcgctgccagtttgtctgggatcgttacggtagttttgacgagaatagctcctgttggattcgcgtaaccggtttttcatcgggcggtcgtttcggcaacacgcacctgccgcgcatcggccaggaagtcattgtcatatacgagggcggagacccggatcggccaatcatcatcgggcctgtcaataaccggctgaacctgccgccgtggcagttgcccagccagcatgcattgtccggctaccagagcaaggaactgttcggcgaaggccgcaaccagaccctctacgacgacacgcagggccagcagcaggtgcaagtcgggtcggactaccagaacagcctgctggccctgggccacattgtccgggtgaggggttgggagggacgcaaggacaagcggggagaagggttcgaactgcgcaccgacgcgcatggcgcgctgcgcgccgcacttggcctgcttatcaccaccttttcgcgcctgaacgctgaaggcaacgcgatgaatgtgcgggatgtcgtccagttgctcgaacaggcacagggcattgccgccaccatgggagagaaggcgactgaagcccaggcccaggacggcgaacagaccgacattgcaaaactgctggagaagcagctcgagcaaatccagggcggaggcgaactgaaggaatttaccgccccccatctggtatcggccagccccgccggcatcgtctccacggcagcgggttcgacccacatcgccagcggtggcgacaccgcactgaccacgggggaacacctgtccgtcaccgccggtggcggcttctttgccagcgtgcgcaaggcgctgcgcatgttcgcctatgaggctggcatgaagctggttgcaaacatgggcgatatcgacctgcaagccctgaagaacaatatcaatctgctggcgaagctcaagatcaccctgaccgccgacgagatcaccattcaggccaggcagaaactgttgctggcaggcggcggcagctacctgcgactggacggcaacatcgagcatggcaccaacggcaggttcaccgtccacgccgccagcaagctgctgaccgggcctaacagcatcccgacggaactgagcacaaagcaggtctgcctggaatgcctgctcaaggcagccaggcgcaacacgggcctgttgctgcgctgacccgagaccggcgatgacaaccgaaccaaacaccgtctatatctacgcgctcgccgacggcgcccagcacccgctgctgattggtgacctgatgcgcgaggccaccgagcaccgtaatgtgtatgccggccttcccgaggaagaagcgggcgacgcctcgctgttcctggcgcacattgcagatgcaggcgaaccgtggcttgccaggctggatgaactggacttgctcgccccctgcatgaccctgatctggagccgcatcgggatcgacgcgctcgccacgcacctgcggcagttcctgatcgccgacctcggcgacgggctgaacgccatggtgcgttatttcgatccgcgcaacctgcgcacagtcatgacgctgtggggcgaagagacgacgcacaagctgatggaacccattctccagtggaagtaccgcggccatgatcccgagtggaagcgactggatgggccgctgaacggcaatcagttcgagacgacaccagttgccattgcattcgatgagcagcaggttgatgacttcatggcgcactgcgagccggatcagatgctggcgggcctcgttgaagacggcaccgtaccgggcgatggtccctacctgccgcgcttcctggatttcgttgcgcgttacaagcgcgtggctgcctggcggctcatcgagcccgccgaccgccttgggtactgccaatactcgtaccgctatggcgccgactttgatcaagatccagacgtgtaccgcgcgttggaacaacggatgcacgagggcggcagcttcaacgcctgcatggcccatgttcctgactacgtgtggaagcgcgtgcttgccaggcaggccgatcaacaagcggagagaaacgatgacaagaaatagcttgaatcggaagcgcgcacatcgatggcaagccgcactggtgttgctgggcgcgctcggtgtcctttccgcatgctcaggcgaatcgcggactgacttggcggcaaaaaccacggttggagctgagaaggagcacgtaagtcccggcagcgctcgcggtctgaactactcgtccgatgccatctatagctattacgtcacggggccacgaggaatgaacggtggcggcgcaaacatggggcctgcatacaaagaagggcctgccgaacctggcgagatgtgttgcgtcggcatccctcagccatggaagcccggcacgcaactacgcatcgaatgggagcgcgaccgcaagccgtttgactacaaggacagaagcgggctggcggtgctgaccgcaacagtcaccgtgccggaatacggtccggatacctacggattctgggcgatattcctaccgggggatcgtgtcaaggtgatggtcatggacggcaatgcgaatggtcacaattccgtcagaacgaagcccgcagatgacgaccctttcgtcgttcaaggtgtacgtgacgaggccctgacccagcaagcactgaagaggttccaatgatgagcgagggcgcaccttcaacgcctgcatagcggactacgtggggaaccgtgtgatcgtcacgcaggccgatcaacaaacggagaagaacgatgagaacaagtagcttgatgcgaaagcgccttccttcatggttcgccgcgctggtgttgctgggcgcgcttggagccctttcggcatgctcgggggaatcgcggactgacttggcggaaaaagccaccgctggaattgagaaggagcacctatcggccgataccgccggcggagccgccaaggaagaaatctatgggggtggggtgcgcgggctgaactactcgtcagatgccatctatagcttcagcgtcaccgggccgcggggcatgaacggcggcggcgcaaacatggggcctgcatacaaagaaggccctggcgaagcgggcgagaaatgctgtatcgggattccgaaattctggaagccaaatacgcaactgaagatcaaatgggagcgtgaccgcaagcccttcgactacaaggacagaagcgggctggcagtgctgaccgcaacggtcaccgtgccggaatacggtccggatacctacggattctgggcgatattcctaccgggggatcgtgtcaaggtgatggtcatggacggcaatgcgaatggtcacaattccgtcagaacgaagcccacagaagacgaccctttcgtcgttcaaggtgtacgtgacgaggccctgacccagcaagcactgaagaggttccaatgatgaccgctttccgcctgcctattgccatgccggaaacggataagggtcgccttcccgagggaaagcgcgcctaccagaatggcaagaccaccgtggacgatccccatggcgactgtgaacagacaattcacatcaacctgttcttcgatggcaccaacaacaatgatgatgtcagaactcctgcccgctggcgggattctacctacaagacgcataccaatgttgcgcggttgttccgggcctgccctacccgcccgcagcaggggatcttcagttcttacattgcgggagtcggtacgctctttcccgaattgggcgaacacacctatagcagtagtggcaaggcttttgcgagcggctttgccaaacgctgtgcttggggttacacgcgcgtgctgaacgccgtgtaccaagctatggttccgggagacgaaaatggtctcatcaaagatgacgaagctgccaagatttgtgcgaagctcgactggaacctgggttcctccctactcactgccaaggagaagcacctcggcagcctatacgactcgctggttcgccagtgcaaacgcaatcgtctcgtcaggaaggcatacgtcaacgtttttggcttttcgcgcggcgcggcgggcgcccgagtgttcgtcagcaagctgatcaactactgggccaaggccgggaagctggcgggcaagatcgactacgaagtcaacttcctggggctgttcgatacggttgcgtcggtgggcccgcccgagtcgtttcaatccgccgtggatctggaatacttcgacgggcatttctgggcggcagggggcggcgccctgaacattcccgcccaggtgcggcggtgcgtgcatttcttctccatgcatgaacaacgcatgagcttcccgctggattccatccggaaggggaagagctacccggcaggcgacagcaagctgctggaagtgccctacccgggcgtccactcggacgtgggtggcagctacgcgccgggcgatcagggcaagtcggtcaagggcgagggccaccggttgggcaagattccgctgcacgacatgtacatcgaggcactgaaggtcggtgtgccgctgcggctggtggatgccaagaacgacgaagaccggatggatgcgaacaacatgcaggatttcgccatcgaccctgccgtcgccaaggccttcaacgattggcgggcaaccctgcccgccattgacggcgtggagaaggccctcgaatttggcctgcggcaaagcctgcaatggcgcgccttgcgcgcacgctggcacaccggcacctacattaccaaccaagggttctaccactattgcgcggagccggcgaacaagcgcgaggacagcaagactccccagcaactgcgcactgacgtggataaggcaaggaaggccgatcccgtaatccagaagctggaacaggacagcatccagttgaagcttcaggtccagcagctcagagaccgcgcaatgtttccccagacgacttcgcaggacatggcgggtttgaccaagcgccgagccctggaggccaagattgccgcgaacgatgccgccatcgccgcgcgggagaatgagctgatggcggaggcggttggcaagaacccggccgactgccgccctggggaaggtgccgatgactttgtcaccaatgaccgcaccgacttgctggaggcggctgaggaattccagttgctattgggatacctgcaccctgaacttcagcccggcttgaatgtgcggaaggaaatgatggcccggccggctttttcacccatcggggcagcggaacgggtcgccaatggtttcaagtacctggcgatgccccgcgcagagcgtccacgcacggattcgaagctgctcgttatggtcgacgacgatatcttgaccaaaagcgctgccgttcgcggttattggcccatcgatgacgtattggtggaacctgcgccggagatgatcctctacctgagggccacgaccgctgccaaggccgtggacgactttgccttgcgtgagaaggcagccattgagttgttcgataactacatccacgacagccgtgcctggttccgtgtgccgaatttccacgaatacgcaccaggcggctacgggtgggccaggacattctttgtcggcgacagcaaggcagtgcggcacctcggcatgagcgcaaagggcgtgttggacaaggtgcaagataccgctctggccgtcgagcgcgaaatcgatgccgccaaggacagggcgatgcgggcattgggcgacgcagcagggcgcgcagcggatgccgcccgggatgcagtcatcgatcaaggcaggaaggccatggaaaaagtcatcccctcgggattcccgatgccaagactgtgacggacgcatgatggcaaatgcaccgctcttgccgcatccgtcaatccttgaaggaacgccaacatgacagcatggctagacaaagatgatcccgcgccgcaacggacacggccgccgaaaccaggctcctctgccaggcaggccgtaaccggtcaggagactcaggaacccgccacgaagcttctcccttcagccaagaccatcgaggtccgcattgccgagatcaacggtgcgcgcaatcccctgctgaaagccgccaggccgctgctgcgcgcactggcagacatcccgcccaagctggataagcgcggtgaggtggaacgtctgcgcaccctgctggagcaggaattgcgcaccttccaggcggtgtgcgaccgactgaacatcgaccgcaaacacaccaccgccgcgcactacgcactctgcaccgcgctggatgaggccgtgagccataccgagtggggcggcggcagtgcggcttcgctgggcgcatggcctggcagcgccctggcctcgacctttcaccaggaccgcgagggcggcaccaaggtgttcctcatcctgggccggttggtggaatcggtggccgagaacatcggcaccatcgaggtctactaccacatcctctcgctggggtttcaggggcggtatcgcggcatggcggacggtgaccagcaactgcacgcgatccggggacgcctgctcgatgcgatcagcaagcacaacgggccagtgcccaaggaactgtcttcccactcgcagcccgccccgcctggccgcttccatcacctgagcggcatcccggtctggatgacctgcacagcgggccttctggccgtcgctggcctggccggatactacaagtaccagctgatgctccaggagcgtgacgtagtgcaacagatcggggccattggcaacctgactccaccccccgcaccgaaggcgttgcgcctggccgagctgctcaaggacgagatcgcgcgcggcgtggtagctgtcagggacgacaaccaccgcagcaccgtagtgtttcgcggcgacgacatgttcggcgcgggccgggccgaggtcaatgcgaagctgacgccgacgctgaacaaagtggcgggcgaaatcaataagttgcagggcaaggtgcaggtgatcggccacagcgacaaccagcccatcaagagcgcccgctacccgtccaaccaggtcctgtccgaggagcgtgccgccatggtcagcgaatacctcgccagccagggcgtcgccaagagacgcctcgaagccatcggcaaaggcgacaccgagccgttgacggacaacaagacccccgccgcccgcgcggcgaaccggcgggtggaagtggtcgtcacacagtaggaagctcggacgccaaggcgggctataaagggcggttgaaccggcggctttcccttcacgccttctctcccgctacctggttcaccgacagggcctgcgccgtctggatcagcggcgcccgcgcttcatccaggctgaggctggcaccgaggcagcgcaggttatgcccgcgctgcctcggttgccgccgcagcgcgtgtccggctgaccatcagcgccagcaatgctgcaaccatgcaggccgcaccggccgcgtacagcgccggcgtataggtcagcagcagcgtacggctcaaccccgcaccgaacgctgctacggccgcgccgatctggtgggccgcgaagatccagccgaacaccatcggcgcgcgttcgcgcccgaaggcggtggccgccagcttgatagtgggcggcacggtggcgatccagtccaggccgtagaacatcgcaaagatcgacaggccgtacagcgtgaaggtcgaatgcggcagccagaacagcgacaggccgcgcagcgcgtagtaccagaacagcagcttgcggctgtcgtagcggtccgacagccagcccgacaggatggtgccgatgaaatcgaacgcacccatcatcgccagcgccgaggcggccggcaccgggcccatgccgaagtcgccgcacagcgcgatgaagtgggtctggatcagcccgttagtgctcaggccgcagatgaagaaggtgccggccagtacccagaaggtctgggtacgggcggcatcgcgcagcaccaggaaaggcccgcgcagcgtgaacggcgtgacggtttgtgcggcgggcggcgtggctggatgggccgggatatcgccaaacgccgccaggccgacatcggcgggtcggttgcgcatcagtgcgaataccagcagcgccagcgccgcgcaggcagccagcaccggcagcacggccacgcgccagcccatatgctcgatcagccaggcggccaccggcaggaaggccagttgccccgtcgccgcgctggccgtcaggatgccgatcaccagcccgcgccgcgcgctgaaccagcggttggcaaccagggccgccagcaccagcgcggtcagcccggagccaacgcccagcatcaggccccaggcgacaaagagctgccacaactcggtcgtcacggtggccagcgccatgccaccggcaatcagcgccagcgcggcgcagaccacgttgcgcaccccgaagcgatccatcagcagcgccgagaacggtgccatcagcccgaacagcgcaaagcgaaaggccaggatcgatgagatctggtcggtgttccaacccatctccttggtcagcggcttaaggaaggcgccaggcaggccaagcgcggccgaagtggtgagcatcaccaggaaggtcagggcggcgaccagccacgcgtagtggatgccgcgccggtcgagccggctggaaagggcttgcgcgaacatgggggtctcgttgtcagggtccgggaaggcgttggcaaagggcaaagcgaagccatccccgccgtgtctgacggcggcggggtgtctcagccttggggaaaacggggtttaggcggtgctgcccagcaggcggctccgcaccgcattcagcatctcgtcggagagcggatcgccgtcggcggcacgcgccagcgtaagggcgccgaccagcagggccatgcgcaccagcgcttcatcgtggcgcagctgggggtcatcggattcaacggtctgcgccatgtcgtccaccaacgcgcgcaagccttccacgtaggcctggcgcacgggcttgccggccggctcgcgggccacgtccacggccagcgccgcggcggcacaacccacgcccgggttggcgcaatgcgcggcggtcaggtagggctcaaccaggttggccagcatggccttgcggtcgccatcggcgcgggccaggcggcgttcccagcgggcggtcgattcttcaaacgcgcgcttgcaggcctgcgcggccagcgcgtccttggaggcgaagtggccatagaagccgccatgggtcaggcccgcgtcggccatcaactcggccacgctgacgccattcagtccgcgttcgcggaacaggcgcgacgacgcctgttcgatcgcctcgcggttcttgtcggtttgttcgcgtgatgcgcgtgccatctgaagacctcttcgggatttatgccttgaccggagtttagatgatgcccatactttattcaatagatgattgtcatcatctatgtgcagtctccctttcgccgcatttgtgccgatgtgtgtccaggtgccggctcccaatcttcacaggagtgatcagtcatgcagaacctcttcgaccttggcggccgcgttgccgtcatcaccggctccacccgtggcatgggcctggaaatggcgcgcgcgcttggcgcggccggcgccgccgtggtggtgtccgggcgcgatgcaggcgcggcgcgcgacgccgccagtcagctggaggccgagggcatccgcgccaccggcatcgcctgcgatatcgccgatgtcgacagcgtgcgcgccttcgcggagcaggcgctggccgcgtatgggcgcgtcgatgcactggtgctcaatgccgccgcgagcggccagcccggatcgatgctgagccagggacccgaggtgttcgatgcggccatggcgggcaatgtgcgcggcaacctggtgctggtgaacgccctggcgccgcagatgatcagtcgccatgacggatccatcatcttcatgtcgagcattgccgccaagcgtggctctgccttcctggggatgtacagcgtgaccaaggccgccatcgaccaggcggtacgcagcctggcgctggagctggggccgtccggcatcaacgtcaacgcaatcaatcccggcccggtgcgcaccgagttctcgcgcgacgcgctgtggggcgatccggagcgcgaggcgcggctggctgcgggcgtgccgatgcggcgcatcggcgaggccagcgatgtcgcgggtcttgccgtcctgctggcggcaccggccgggcgctttatccacgggcagagcatcggcgtggatggcgggctgtcggcgcagtaaccccgtgccgtggcgggcggccgatgctcagtgtcattggccgggcggaggcgaaatgtgcatacataggaacgcgccttcagcacgttgaagggttttcccgtatcgtcttgacctgacgttcaccatgccttgcgtgcagccctcgcaccactagtcccggcatggcggcaaccggtaaagacagtgtccagcacagcacctctccaatccgcttccaccgcggacgccgcgatgacttcgcgcgagcgccgcggcatggccgccatcctcatcgccgtcgcccttgccaccctggataccgcgatcgccaacacggcgctgccgtcgatcgcggcggacctgcgcgccacgccggccgcgtcggtgtgggtgatcaatgcctaccagctggccatggtgtcgacgctgctgccgttcgcggcgctgggcggcgtggtgggccaccggcgcatctaccttggcggcgtggtgctgttcaccgccgcctccgtggtgtgcgcgctggcgtggtcgctgccgacgctggcggcggcgcgtgtgctgcaaggcatcggcgcggcggcaatcatgagcgtcaatacggcgctgatcagcgcgatcttccccacgcaccggctcgggcgcgggctggggctcaatgcgctggtagtgggcgtgtcgttcgcggtgggccccaccgtggcctcggtgatcctgtcattcggcacgtggccgtggctgttcgccgtcaacctgccgatcggcctgctcgcgctggcgatcgggcgcggctccttgccgcagacgccgcgcagtgcgcatgggttcgaccgcgtcgcggcggggctcagcgtggttgcctttgccgcgctggtccttgcgctgggcgaaggtgcgcagcgcgcgccgctgcatctgtcgctggccgcggcgggcatcttcatggtgacgttcggcctgctgctgtggcgcgagcgcggccatccggcgccgatgctgccggtggacctgttccggcggcccatgttcgcgctgtcgacgctgaccgcggtgtgctccttcgccgcgcaaggcctggccttcgtctcgctgccgttctacttccagcacgtgctcgggcgcgggcaggtcgagaccggtttcctgctgaccccgtggtccgtcgtggtggcgctgatcgggccgcttgccgggcgcctgtctgaccgctacccgccggccgtgctcggcggcgtggggctggcggtgcttagcgttggcatgctgtcgctggccatgctgccggccgaccccagcgcgcttgatatcggcatccgcatgtgcatctgcggtgcgggtttcggcttcttccagtcgcccaacctcaaggcgttgatgacgagcgccccgcgcgagcgcagcggtggcgccagcggcgtggtggccacggcgcggttgctggggcaggccacgggtgcagcactggtggcgctgtgttttggcattgccggggaccacgggccggggttggccctggcgctgggcgcgggcttcgccgggctggccgcgatcgcgagctggctgcgcctggcagcgcgcgatccgttggcggcgtcgtagcggcgcggccgggccggcagcaattccggcgccggcctagaatcgatatttcctgtccgatccctgcatggagcagcacgcatgagctttctgttcgaaccgctcgccatcggcgatctcaccctcgccaaccgcatcatcatcgccccgatgtgccagtactccgcgcgggacggcaacgccggcgactggcacatgatccacctcggttcgctggcgctgtccggcgccggcatgctgatcgtggaagccacggcagtctcgcccgaagggcgcatcacgccgcaggacctgggcctgtattcggacgaaaacgaggcggcgcttggccgcgtggtcaaggcgatgcgcgcgcattcgccgatcgccattgcgatccagttggggcatgccggccgcaaggcgtcgagccaggcgccatgggatggcgggcagcagatcgcgccggatgcgcctggtggctggcatgcggtggcgccttccgcggtaccgcatggcgcggaagaagtcgcgcctgccgcgctggaccgtgccggcatggacaaggtgcgcgacgactttgtcgcggcggcaaggcgtgcggcgcggcttgggttgaacgggatcgagatccatgccgcgcacggctacctgctgcaccagttcctgtcgccgctggccaaccatcgtgacgacgaatacggcggcagcctggagaaccgcatgcggttcccgatcgaggtgttcgacgcggtgcgtgaggtgttcccggctgagcgtccggtgtggatgcgtatttccgcaaccgactgggtgccgggcggatgggatatcgaaggcacggtggcgttgtcgaaggctctcaaggcgcgcggctgtgcggcgatccatgtgaccaccggcggcgtgtcgccgcagcaggcgatcaagctcgggcccggctaccaggtgccgtacgcgcagcgcgtaaaggccgaggttggcctgccgacgattgcggtgggcctgatcactgagccggagcaggccgaagccatcatcgccaaccacgaagccgacgcggtgtcgctggcccgtgccatgctgtatgacccgcgctggccctggcatgcggccgcgcggctgggcgcaagcgtgcaggcgccgaagcaatactggcggtcgcagccgcgcgaactgaaagacctgtttgccgatgcggctttcgggcagcgctaggctgccggtcgatacaggaggaacccgccatgagaccccggattacgctgatcacgctgggtgtcgatgacctgcagcgtgcggtgcgcttctatcgcgacggcctgggactgcccaccgcaggcattgtcggcgagcagttcgagcacggcgccgtggccttcttcgacctgcaggccggattgaagctcgcggtctggccgcgcaccagtcttgcgcatgacaccggactgcagctgacaccgcgcgcgcagacggatttctcgctggcgcataacgtcggcgacaaggcggaagtggatgcggtgatggcccaggcgctggccgcgggcgccagcgtggtcaagccggcgcaggatacgttctggggcgggtacgccggctatttccaggatcccgacgggcatctgtgggaaatcgcctggaatcctgagatgttgcccgcggattaaggaccggcgcgatgcgcgccttgcgcacgccccgttccttctatcaagaccttgccttgcggcgctgcatcatgactggtgcagtgccgcaaagggatttccatgattgccacgctccgtcgaagtggtgactatcatttcaacagacagccatagcatgctggcgacggagcgcccccacgcattcccggaagacccccgcatcacgccccgtcggcagcccaccgaagtaaagcaataagaacaatggcaagggagacatccatgcaagtctatgacagcctgctgtatgtgactgcgatggtgctggtgtgtttgtatgtgtatctgggcgtgctgtcccgcagcacggcgatccggctgggttccccggcgatcgttgcggggctggtgctcgcctattcgctgtccccgctgcactcgggcggctgatgccgccggcccccggctgagcgggggttctgctgattctaccgcggccgccgcctgacggtcggggttgccttcgccctgcgtgatcgagtcgcgcggcagcgtatcgatcgctgccggcaagtcctgcggtagcaccggttgtgcagcccaacgaaaaaaatgccggcgccgcaaggcgacaccggcttgaatcgctgtccggacgcagcagtccggcgacttgcagcggagttacagacggttgaccgagatgctgaagaaccggcgagccgtattcacgccgatcgccacattcaggcccgtgttgccaatcgacatgctgatggcctcactaccgccgctgttgttgggcgtcggggcacggtagcgcagcccgtcgagcggggtgttcaccttccaggtgtccacccgtccgtcgtcgcgctcgcgcgtgtacgtgtttgcctgggcatccaccgcggtgaccttgaccgtggaggccgtcgtcgtgctgatgccatcggccgtggcggagttgctgtccaccggaagaatgctcgtgtcccagaacgaactggtcgcgcccacggcaggcagcgcacgggcgatccgtctggtggccatcgtgaatccgtcaccgtgggtgaagacgatgaccagttgcccgtcggtgcccttgaacgcgtaggcccgctcaacaccaccgtcctgttcggtgaggttcagcccgccatcggggttgagcgtgatggtgggaaattcatccggcagccatgccgagcacgaatccaggcccgagcaatctgcgccggcggtcaccttgcccgcggcatccaggctgaagttcacgcgcgacgccgcgtacggcgacgggccatcgcgctcatagccaagaccattccagtcgccagccaggtcggccagggccagtgcctgggcaggaatcagcagggcgggcaggcggttgaccgtgccagccggaggcagcaccacgctcaggcccgacttggagaccagcacggtgtcggtgcctgcggtgaagcggcaggcttccgatgcgtcggcggtgaaggtggtcacgtcggtgcccagcttgaactgcaacgtggcggcgtccatttcgccggcttctccaatcggcgtgcccagttccacgacgtggtacttgccggtcttcaacccggcgcaggtggccgctgccggttgcagtgcggtctggactgccgctgcgccggcattggcagcgactgctgaagaaagctcagccagcgtggtcttggatgcctccaggcgatcgcccaactggtccagcagctggtcctgcgcattgcccgcgttggcgccgttggcggccaccagcggatccttgaccgggtcgatgctggaaaggtcgaccacgcccgtcagcaccaggcgcacggcgccgatggcactggttacgttgtcggaggtgagcctggcttgcgcgttcgcatcgaactgctcgaagaaggcatcggtgttgccctgtgccagtgaagcggtgaccagctcggtcagcggcgtgatgttggccgtcgcggtggtgccggtgccggcttcgaccacggaatgcagcgtggtgccgtcaggcgccgtgacgctgagcacgcagggacgcgtcgcgccttcgatgctgatggtgaagctgccgtccgccgcggtggtggcggtgccgctgcccgatgcgcacttggcctgcacggcggcattgcccagtgcggcgccaactgcggcggtgccactgatcctggtggcggcaggtgccgccgtggtggtggtcggcgcggtcgaaccgccatcgccgcctccgcatgcagacaggaccgccgtcgccagacccgtcaagaacagttgttttgttttcatcccgtttcgccctgtatggtttttgttctggcggagtcctgcggtggtcgatatccggctcatgcaggccccgcccgcagggtggctgacccgccccgcgaggcgagtctgcgtgataggggggatggggccaacccgagttcaggcgattgacaaactgtcgggagtgtgtgggcagaggctgctgcggcaacgctgcaggatggctgtcacgtgcctggctgccgtggttgcattcattggtctggcggaaaaaagaaaagccggtgccgcagggcggcaccggcttggttcgtgtccgggcgcggggtgcccggattcacggttgggggcgaggttacgggcggccgaccgagatatcgtagaacaatccgttcacgccgatgccgagggtcagggcggtattgcccgggatcagcgaaatcattgccgatgcattgctggttgctgcgcgcggtggttgacaaactccgcgccatgtgacgcccaggccgctgcgtcaggcggccgtcggcacaaggccgggccaggtggcagtgggcgctgtggtgcggctgcctgcccggcaatcttccaccaggcgcgccgcatcgatgccgaaccagttctgccagctgcgcgccagcgcgctgccggaacgcaggccggcatgcgccgccagcacgtccagcgaagacaccgggccggcggcggccagcgcgtgcagggcatgggcggcgcgttgctcgcgcagcagcgggtgcagcgcctcgccttcggcgaagagccgggcgcgcacctggcgggccggcacctgccattgcgcggccaggcgctcgacattccagtcggtatcggggcgggaaaagaccaggccggcaaagcggcgcgaccagggcctgtcgccgggcttgccggccaggcgcgggcattcactgtccgggacggcagtcaggacgatggcgcaagggtgctgccacgtgccgggcaggtcgcagtcgaagtgggcaaaggcgtggaccacgaacgggtcgccgggccgcacctcgcgccgcgcattggcgtcgcgcaggctggccgtgccgtgcagggcttgtacctgcacggcaaaggggaagcgcaggcgggcaaagcggacgtggtgacggctgacaagcggcatgcggaagacaacccggaagctgagcgggggtgcggccggtaactgtcgcaggattcaacgggcggcgcaaggccgcggacatcgtccgtttgatcgttcacggcgcccggtgacggcggcgttacagctcggacagcccgaagtggcgcagccggggcaggtcggtcacgcggatgctctggtaggacaggtggaccatgccggcatcggccagccggcgcagcgcctggttgacccgctggcgcgacagcccggtcagcaggccgatctcttcctgcgacagctccagcacggggctggtgcgcggatacaggtccgggtggaacagctgcgcgatggcctgcgccacgcgcgcatcggcgcccagcaggcggtcgttctgcacggtggcgatgaactggcccatgcgctcattgagctggcgcacgacaaagctggcgaacggcaggctctgcgccagcagcgtattgaacaccggctctggcaccagcagcacctgcgagtcacggatcgcgatcacgtcatagcggcggtcttcgcgcttgatcacgctgccttcgccgcaccagccgccggcgggcacgccggagaaggtgcagccgcgcccgtcgggggtgtacaccgccagcttgatcaggccgctgtccaccccgatccagtggcgcgacggctcgccgcgccgggcgatgaaggcgcccgcggcaaaggactggagcagcgtttcgcgcgcggccagcgcctggtgttccggcgccagggcaccgaaccaggcatggccggcaaggactgcggcaggggcggaaatcgggtctgcaggttcgctcatggcatggacgcgcggctcgggccgggtccctgtaagaatcgtgtaagccttgcctggcgcgggtttgcggcaggtttgtcgtctcggcgacagtgcgccagcgtgtgcgatgatagccttgtgccagaaaaagtgacagcgccggatggcgcggacaatggtcacctcgccccggacatcgctgcacccatgcagcgcattgacagcatcacgcggcctgttgcgcggccctgccgccaacgccgccagatacgcggagacacaagcaatgcccaccgatttcgacagcggcctggcccgcaacgcggccaacttcgtgccgcttacgcccatcgacttcctggtccgcgccgccgaggtgtacggccagcgcctggccatcgtgcacggcccgctgcgccagaactggcgcgacacctatgcgcgcgcacggcgcctagccagcgcgctggcgcgtgccggcatcggcaagggcgataccgtggccgcgctgctgcccaatacgccggccatggtggaggcgcatttcggcgtgccgatggcgggcgccgtgctcaatgcgctcaatatccgcctcgacgccgccaacctggtcttcatgctgcgccatggcgaggcgcgcgtgctgctggccgataccgagtttgccgacctggcgcgccagatggcgctggagatccccggcctgaaggtcatcgccgtgcatgacgtgctgggcccgcaggaggcgccgttcggcgacaccgattacgaagccttcctcgcctcgggcgactcggactacgcgtggcacatgccggccgacgagtgggaagccatcgcgctgaactacacctcgggcaccaccggcgaccccaagggcgtggtctaccaccaccgcggcgcggccatcaatgccgtgtccaacatcctcgagtgggatttgcccaagcacccggtctacctgtggacgctgccgatgttccactgcaatggctggtgcttcccgtggaccgttgccgcgcgcgcgggcgtcaacgtgtgcctgcgcaagttcgagcccaggctggtattcgacctgatgcgcgaagagggcgtgacccactactgcgccgcgccgatcgtgcataccgcgctggtcaatgcgcccgccgcgtggcgcgagggcgtgcgcggcccggtgcgcggcatggtggccggcgcgccgccgccggccgcggtgctggcgcagatggaggcgatggggttcgagctgacccatgtctatggcctgaccgaggtctacggcccggccgcggtctgcgccgagcaggatgactggagcacgctgtccgagcaagaccgcgcggtcaggaaggcgcgtcagggcgtgcgctatcacctgcagtcgcaggtggcggtgctcgatcccgattccatgcagccggtgccggccgatggcgagaccatcggcgagatcatgttccgcggcaatatctgcatgaagggctacctcaagaacgagaaggccacgcgcgaggcctttgccggcggctggttccataccggcgacctgggtgtgtgcatgcccgatggctatatcaagatcaaggaccgcagcaaggacatcattatttccggcggcgagaacatctccagcgttgaggtggaggacgcgctctaccggcatcccgcggtgctggccgccgcagtggtggcgcagcccgatgccaggtggggcgagaccccatgcgcgtttgtcgaactgaaggacggcgccagcgtcagcgcggaagaactgatcgcgcattgccgcacgctgctggcgggcttcaaggtgcccaaggcggtctacttcgggccgctgcccaagacctcgaccggcaagatccagaagttcgagctgcgccgcaaggtgaagtcggattcggcgatcgacgtttgatgggctgaagcggcgctggtgcagcgccgctattgcagcgccgcgtcctcggcatcgtgcaggccggcgatgtgcgtgtcgatggcctcgcgcccccaggcaatgcccgcgcgcgtggcgtcggtggcgcagccaaagcgcgtctgcgcggccgggcagggcagcgccagcttgctgccgtgatgccagatctccgcgcgcagcgtccaccacccgtcatgctggccgccatagcgcagcgccgcgacatggatgcggtggccgcggtatgtcacgttctggtcatgccatccgctgggcatagacgtgaggcgcgccggggcaactcaacgcgcccgcatctcggcggggttgccgggtttgggcgggcggtgccagtcctggtcgatgtccgggaacacctcacattcaccccgcacgatgttttcaatggtggcgcatacgcattcggtgccgcgcggccccacgcagaccaggctgcgcggatggtcggtgtgctgcgggatggcatagacacgcatgccctcgcggaagaggggatgcttggtgaggcgctcgttcatcagttcaacgaagcgctggggagtgacgaccggcttatccattgcatgctcctgcggccttgcccaccgtgcccgtttctaggggcggcatggcgaccaggtcagttaaggccaggaatatgacaggcaggtggcaggaagcgccccgggcagcatacgttgcccgggcgtggccggaacggaaaaccgcaggtaaatgcataccctgcgttgccactgccacgcttccagactaggacacgcggcacgtagtgcaagtgttgcgcgatgccgtgggggcttcaggtggcgtgcagctcgcctgcggcgcgcggaccgttcagtatgccgttgccggcggcccagcaggcggcctcggcctctgcgcgggaaccgtaggtggatggcgctgcgacggtgcaatcctcgtcggcggcgccacagcgttcttccatgacgatgcgccaggtgaactggccgggtgcatcttcaaggacgtgaagcaccaatgtgcggtgatcgtcagtcagcgtgaggggcaaagtcgacatggctgtctcccgttcgcgggtgggcgccattgatgctagcaagaggtcgccgcaaatgccatgactgtcttgcggccgcggcatggcaagatacggcctttgcggccttcgccgcgcctgtactttccgccagaccatgcccatctcgcctgagctcaaccaaggggtcgccgccctgacggcacattacgatgccaccgtgctgccgctgtggaccgccagcggctggaacggcgacctgctgctgccctacgaggcactcgacggcgccagtgccgcgccgttggcgccggcccgctatcgcgccatggcatgcgcccgccagctctatgtgttctcgctggccggcaaccatgcgcatgccgatacgctgttcggctcgctgcaggcctacttcggcaatggcgagggcgcgtggctctacagcgtcgacccggccggcacgccgctcgatgccacgcgcgacctctatacgcatgccttcgtgatcttcgcctgcgccaactatcatgcgcggcgcggcaatcccgatgcgctcgacgtgctcgatgaaaccgtcgatgtcgtcgaggacctcttcggcgacgaacagggcctgtaccacgccgcgcttaccgagcatttccggcccaagggcgccggcgtgctgcagaaccccatcatgcacctgaccgaggcctacctggccgcgctggatgcgaccggggacgaatggtatgccgaacgcctgcgcgagatcgcgatggcggtgcatgagcgctttgtcgatccggccagcggctgcattgccgagctgccccaaggcagccccggcaaccgcatcgagccgggccaccagttcgagtggttctcgctggtggcaggcaggccgtcgctgctcggcgacctgccgctggccgatacgctgcgccaggcctttgcctttgcgcagcggcacggcgtggtgccgtcgacgcagggcgtcagcgcggcactgaacgccgatggctccatgctggacgatacccagcgcatctgggcgcagaccgaatatgcgcgcgcgctcgccgtgcatggcgcgccggagtcgctggcggcgctggaagcctggacgcagcagttccgcagccgcttcctgcacgatcacggctggcatgaatgcctggcgcgctcgggcagcgtggtacgcgccgaaatgccttcgacctcgccgtaccacctggcgacgtcctactcggcgctcgccgcgctggccggcgtggcgtggccggcattgccaggggcttaggccaccctgcgccaggcggtgcggcagcacgatgcgctgctgcggggcgtttgtggcggcacaggccctgcagaggcagccgcgtaggcggctaccgcgctcttatcaattctttgcagtcgtcggtggacaccgcgcctacactcaagcccgcgctccggcacgtgctgttgttcttcttaaccactggtcgtcgttctgaagttacgggccggggcgcacccgatgcggctcagcgccgcgcgcccagggcctgcgacagccgctccggctgttgagcggccggggacgcagcgtgggtctggatcaggcctgcgccggcgggcttcacccggacggccatttgctcgacccttttggcggcctgggtctcggcgtggtcattcaggatcaggcacagcagtgtcagcaaggctgctgcgatcatgctcagcgcgatccaggccaggcagtgcttgcgttccatggtaggcgggaggggggcgtcatcagtgcgcgaagtttacgcgcccgcgcgcaatgcaattgtcaatctttgcaaacgccggccgccgtccggcccgctattccgtcacgccgttttcatgcagcagccgctcgcattcttccagcatgtcgtaggcaaacgcagactggtagttgggatcgagggcttccatcatttcgtgcgcggcgtacaggccggcctcgcgtgacagggtctcagccagctggcgtgcaaactggtcgctcagttccgacaacaggcgccgctcggacagcggcaactgcagcttcgagcgcgacagccattcgccggccagcgtcgcaccctgggcgtcggtcatccactggcggtgttcatagtaggccgacagccgttcggcagcgagtgcgaacagcagtgccttgcgggtattgaaatcgatcctggggagtggggcgagggtcatgcttgcggcgtggtgcgatgcgcggcgcagcggccggcaatcatcttgtcggggagcggatcaggactgcgcggtggctgcctgcgcaaagcgcgctgccagccaggcgccgatggcggcgatctcttccaggcagaccgaatggcccatcggataggtgctccaggtcaccgggtgctgccgcgcctgcacgaaatcgcgggcggcgacgcccagctgcagcggcaccacgtcgtcctgcgtgccatgggcggcgaacacgggcgtggtggcgttggcggcgctgacctcggccgccagcgctttcggcgcagggatgtaggtggacagcgcgacgatgccggccagcgtctcggcatggctcagcccggcggtgtaggcaatcgcgccgccctgcgagaagcctgccagcacgatgcggtgcgtggggatgccacgggcgttctcgcgcgcaatcagtgcgcgaatggcttcgcaagaggcacggatgccggcttcatcggcgcgtcgcccggattcatcgagggaataaatgtcataccaggccggcatgacatacccgccgttgcaggtcacggggatagccggcgcgtgcgggaagataaagcgcacgccgggcgctgcgggcaggcgcagctcaggcacgaccggggcgaaatcgctgccgtcggcgcccagcccatgcatccagatgacggcgcaggcgggattgggcgcggtttcgaattcgatcgcgggcagcagttcgctcatggggctggttcctgtggatatgcgcctgcgcgccgcacgggcgccaggcagcgcgagtatcgcacaggtcggggcctgtcccggctgcgtcaggccgcggacggaacgatagggaccgtggtgaggccaggcgtgcgtgccggcagctccggcatcgcaggcggcgtggcgcggcgcttgtcgaccacgtcttccacgcccttggccgcgacgtcttccaggaacgccaccatgtcgcggtagtaggccacctgcatttgcgcttcgagcaagcgcctttcggcctggaacagcgtcagcctcatgtcttgcagttccctctcggcgattttctccggggtcggcggactgaacaggtttgcaagccaacgcatggcagtacctccagtgctgtcaacggcgaaatagcgatgctcgtgccatggggaccaatatagacaagaattcggcaaaaagtctctcgggcatctcgccgtggcgcctcgcccacaaggatgattgccggtggcggacgtctgcggtagattgttcggccatggtccggccgtcccgcgaccctactgcctgcgctcgccgcttgctgtcgccaatgtgcctgtgcgactggtcgatgtgcctgcctgatccgcgttgccaggcggatcgccttcatatttcgcgtcgtttcctgccaacagtgcctgcatggcatcgccgtcctgcgcgcgcacaaagcgcaggatcggcggccagaatgcctcgatatgttctggcaggatggctgcgtcatgcggcatggcgtccagcatcaccagcgcatgcagatgcctggccgcacgggccacgcgttccgcgtggggtgggacgatcaccgcgtcgtcccggctgtgcaccaccagcagcggccgctccagccggctggcacgcgcagcgttgttccacggatccggcagcagccacgcggcccatgcgggtatgcgcccggtctgcactgcggccaggcgcgccgaactgaagcccgccgcaatgacatagccgtcgggctgcggatcgaagcgctgcgccacctccagcaggatgccggatcccagcgaatgccccagcaccacgcgccgttttgcctgcggcgtggctgccaggaattgccggtaggcggccagcgcatcctcgcgcaggcggcgcacgcttggccgcccgctgctgcggccgtagccgctgtagtcgaagacgtaggaggcgatgcccgcgcccgccagcatggcctggaccggggcccagtcgggcaggctctcattgtcgccgtggcacaccatcagcgctggcgcttcggggtccgcggccggcatgaaggcggcgtgcaggatgcgattgccgctggcgaacgtggcatggcgcaccgtcagggctgaaatgtcgggtgctgccgcgtcctttgtttcatccgtcggcgtgacaaaggctttgcgttctaccgcacgaaacagtagatgccgcgcaacacccgcggccacggcgagtgccgcggcggtggcgagccagcggtggcgggattccggctgagcggggcgggggccttcaggcatggcgagtttcgggatggcgttcccttcaggctagcaggccatcggcgtccgggtgaagaaaagttcattcgcacgcatgccttaagtggattcgcagccatatcgtgcagcgtcggcaggcggctatcggcccgatagaaaacttttgccttgactatctacctagtagtagatagcattgagtccatggcaccgctgcaccgccggaagcaagcaagagcgggcggaaaagtggcgatcccatcgcaagaccggcatggtcatttttttagcacctgtcatctatctactggtagatgcggctcgaaagagtgaccctgccacagccactgataccgaattgaagcgatcccgaaacatcgcacccaggagcccatcatgaatgccaagttcgccaagaccctgatcaccgccgccacccttgccgccgcactggcaggtggcgtggcgcaagccgccagcgtgcaagacaacacctcggctggcgacaagtacggctacagctaccgcgccggcaagttcgacaccttcacggaaggtgcccgcaccggcaagttcgacccgttcacggaaggcgcccgcgtcggcaagtttgatccgtacaccgacggcgcccgcgtcggcaagaccgatccctacacggacgggtaccgcaccgtagctggcctggaccgtagtggcgtgtcggccgggccggcccgcagcttcgacccgtacacggacggcgcgcgcgtcggcaaggctgacccctacaccgacggcgccctggcttgattgctgccggctgaggccggcggccaacaactttacggcggcggtcacgctgactgccgtccgatggagtccatcatgagtttgcgtgacagtgtcctgctgcttggcggatggctggtgctttgcgtgacgagtggctcgatgatcaccttcgccgcgcaggtcctgcctggttaaagcacatgcctcagatgccccgggctagggaattaccccagccccggggcatttcggcttgagcgcctatcttcgcgtagataaactgctttcatgaaaacgcaatcagtacgcgagcaactgctcgagcacaccctcgtcctgatccgccgccgcggcttcaacggcttcagctaccgcgacctggcggaactggtgggggtcaagacctccagcatccactattacttcccgtccaaagaggacctggtactggaggcggtgaaggaatacagcgcccgcctggccgagcgcatccgctccatcgacaccagtctgccggtcgccgagcaggcggccatctacctggcgccgttccgcgccagctgcggctcggaccagatctgcctgtgcggcatgttgtcgaccgagacgctgtgcctgccggagtccgtgcacaagctgctgcagggcttcttcctgatgaacgaacaatggctggccggcctgctggagcgggctcagccgcagcgcagcacgccgttcccggtgccgccggcgcggctggcacaggtggtgtttggctcgctgcagagcgggctgattgcggcacgcctgttcgggacctccgaccgggtggaagccgctgcggatacgctgatggccgccgtcgccggctaaggttttcgcgcaatatcagtggcgcgtctgaagccgtcatgtggcgcaagctgcatggcggcttttttatttgcagacagccggtcggccgccggcgcttcggaatcggtgataagcgcttttaaaacaacgagatagagccagaaaaggcataggctatcgggccgatagaaatgtttttccttgactctctacctagtagtagatagtatttgactcatggaagcgctgcaccgccggcaacaagcaagacaaggcgaaaacgtggcggtcccattgcatgaccggaggcggtcattttttcgaggccgagtatctatctactagtagatgcggaatcgaaaaaaacgatctgccacagccactgataccgaattgacgcgatcccgaaacatcgcaccctggagcccatcatgaccaagatcaccaagaccctgattaccgccgccacccttgccgccgcgctcgcgggcggtgttgcgcaagcggccagcgtgcaggacagcaccttcaccggcgacaagtacggctacaccttccgcaccggcaagttcgacaccttcacggaaggcgcccgcaccggcaagtttgatccgttcaccgaaggcgcgcgcgttggcaaggccgatccctacaccgatggtgcccgcgttggcaaggctgatccctacaccgacggtgcccgcacggtagcgggcctggaccgcagcggtgtctcggcccaaccgtcgcgcagcttcgacccgtacaccgatggtgcccgcgttggcaagcccgatccctacaccgacggtgcccgcacggtagccggcctggaccgcagcggtgtttcggcccaaccgtcgcgcagcttcgacccgtacaccgatggtgcccgcgttggcaagcctgatccctacaccgacggtgcccgcacggtagccggcctggaccgcagcggtgtttcggcccaaccgtcgcgcagcttcgatccgtacaccgacggtgcgcgcgtgggcaaggctgacccttataccgacggcgccatcgcctgagagccggccggcgtaatgccggccattgaaaaccgccgggccgcctgggtgcggcccgtcttcaggagttgatcatgcgttggcgtgacactgcgctgatccttggcggatgggtagggctttgcttcgcaagcgggtccctcatcacgctgatcgcacaaacgctgccggcctgaacggcgcggcagcaagacgatggagttgatgccatgaacacccgatccgtacgcgagcaactggtcgaacatgcgctggtgctgatccgccgcagggggttcaatggcttcagctaccgcgacctggccgacctggtcggggtcaagacctcgagcatccactattacttcccgtccaaggacgacctggtgctggcagcggtgcgcgaatacggcacccgcaggcgggcgcgcctggatgcgatcgacgccagcctgccgcccgcggagcaggcgcggcaataccttgcgcctttgcgcgcgggtgccggcaccgaccaggcttgcctggtgggcatgctgtcggccgacgtgctgatgctgccggacgcggtgcgcgccgcgatgcaggactttatccggctcaatgagcaatggctggccagcttgttcgagcgcgccgcggcgcagcgcaagtcgccctatccgattccgccgcagcagctggcgcaggtggtgttcggggcgttgcagaacggcttgatcagtgcgcggctgtttggcacgccggaccggctcgatgccgcggcggcgctgctgaccagcgccatgccggcggagcaggccttagccgccgcttagtgtcagtatcaccgagccggcgacggcattgcacagccactgcgggtcatcgtggggcaggtcatgcccggcccagtggtgcgtcagcaactgcgcgtcccaggcttgcgcgatgcgcgccgagcacaccgggttgaccaggcggtctgccgccgaggcaagcagcagcgccgggcagcgcggcgcactggcgggagcgcgatagcgggcagcggccagcaactgtgccagcgcggcttggcggctcaccggcgcgtcggcggcaatggcctgccaggtctcgagatcgcgtgccagcgtatcggtgcgggcacaggtgatggcatggatggtccgctcgcagtacgcgcggtcctgccagcgctgcgccacgcgcagcagcttgccccagttgcgcggccgcaggcgctgtgcgggcgtgcagaacggccgcatgctggtattgaccagcaccaggccgccgacttcctccggataggcgctggcccactcggtcgcggccatcgcacccagcgacatcgccagcacgcggtaggggccgtgcgcgccggtggccgacaactggcgccgcaccgcggtgaccatctcaggcacgctccacggcgccggctgcgccgacagcgcgccgttgccgggcaggtcgggcagcagcggccggcccagcccggccgcttcccaacgcgccggcaggcttccccagtggcgcgattcccgcgtcagtccccgcaagaatacccatcggctcatggcggcggctccgtctgccagtgtgcgcgtgcctgcagcagcaggtcgtcacgctgcgcgccgcgcggccgccagcgatccggcgcaaaggccacgcggcccaggaagtcgaacaggctcacgtgccggcgcagcacgcgcgcggtgcggtgcgccttgatcgggttgaagatgccctcgcgcgagaacagctggcgcgggttcttcttgatccacagccacgagcccagttccagcgtcatcggcaggaacaggttgccgtgcggcgtcaggtcataggcatggtcccacaggtcgccgtgcagcaggtactggtggctttgcggctcgaaggtgtagccgtggtgcgggtgggcctgctcgaacagcgtcttgagcaggtacatctcgggcaggtgcgccatcggccggcgcgtgcccgcgtacggaaaccagatactgtcgcgccagccgtagcctgaatggcagtccaccgcaaagctgagcgggcgcggcagcagttcttcctgcaccacgcgcagcagcgcgcggctttccgcttccatcggcgcgcccgccgggccgcggtaccagggcagccaggcgccgatgcgctggccgccggccaggaagggcacacgcgcatcggcgtcctgcgggccattgcgcatcaggtcgacgccgttggggttggcgcgggtgccggcccacatgccgccggggttgacgatcggcatgaataccagccgcaccgactgcagttcgcggtgcagcagctcgtcccacgccagccggctcagcaccgagcgcaggtagtccagcaccagctgcgtgccgatgcgttccagcccgtggatgccgccgaagatgccgatcgccggcgcgcccggatcgcggctgccgagcgtggcgacatggacgccgaagcgatggccctgcaccatggtttcgcagaccacccgcgtatccagcacgtggctgcccgtatccagcaaggccagcagctggtcgtactcggggaagccggcgtgcggatgcatgggctcaggcggtcggcacgccggccgtgccgaacaggtgcaagaccggccagccgcgtgcctcggccgcgtcccgcagcgtcgaatccggattgacggcgaccgggtggccaacgctttctagcagcggcagatcgttgcgggagtcgctatagaaggtggcctgtgccagcgccgtgtgcgcaatgcccagcgtgtcgagccacgccagcacgcgcagcaccttgccaggcccaaaggccggcacgccggccagcgcgccggtgaactcgccgtgcgcatcgtgttccgcctccaccgccagcaggtgcggcacgcccagctggcgcgcgatcggctcggtgacaaaacggcaggtggcggtgacgatgcagcacaggtcgccggcggagaggtggcgggccagcaggtcgcgcgccgccggctggatggcgggcacgatcactttgcgcatgaagtccgcgcgccactgcgtcagtcgttcacgcggatggcgcgccagcaggcccagggcaaagcgcgcatgggcggcaaagtccagccgccccgcctggtaggccgccagccagcgcgtgttgtgcgcatcgatttcggcagcctcggcgccgcccacggcaacgaggtagcgagcccattcatactcgctgtcgagcggcagcagggtgtggtcgaggtcaaacagggcgaggcggggggcagcgggcatgcgggatagctcagttggcgaaaccggcaagcttggcgcggcgtggtgaccgcgcggtgatgaaggacccaagttttccgataccggcattggcgctttaccttgcgcggcaggcatgcgggtgtcaggcggcgtgagtggcggcggtcggctcgtccagcgccacgcagtccaggaaggcgccgaccagccgggtctcgcgccggctctgcaggcagtataggtattcatgcagcaccggcgcgccttgtgcgaacggcaccacgcgcagcagcgggtcgcgtggcacctcgcccagcggcaccacgctggcgcccaggccctggcggatggcctcgtagatggcctcgcggctgccgatcacggtgtgcggcggcagttccagcccgcacgcggccagtgccgtctcggtggccttgcgcgtcatcgagccgtgctcgcgcaccagcaggtggcagccgcgcagttgcggcagctcgacctgcgccagccgcgccagcgcatggtccggatgggccaccagcaccatcgggtccgtcgccagccggatgcaggcaagccggtcgtcgtccaccgggtgcgacgataccgcggcgtcgatgcggtactcgaacagcgcctccagcatctgctgcgaattgccgatgtccaggctcacgtcgatcgccgggtagcgctgccggaacgccgccatcgtgcgcaggatgtagtaggggccggtggcgccgatgcgcaggttgccgaagcgcaggttgccggcgttgcgcagcaggtagtcggcattgccttcctgctgcatcagctgctcgaccaccggcatcagcgccacgcccacgtcgctcaggtcgacgcggctggcgcggcggtggaacagctcaacgccgtaggtctcttccagctggcggatgcggccggtgacggtgggctggctgatgcgcagctgcctggccgccatggtgatgctgccctggcgcgccacttcgaaaaaggtcatcagcaggtcgccgagcatggttatccgcaggaaagttggggggcagcccggacaggtcccggacgaccgcgcagtctagcgggccaatatgacaaaacggctacgcccgcccgcggccggagcggccgggggcgggcgcagcgctgcccgtcaggcgacttgcgcgtcagccgttgaggcccatcgccggatcggacacgctgtccttgccggtctcgatgcggccggcgaagcggcgcgtgaagccgccttgcgcggtggtgacggtgaagtcgtaccagttgccctggcgggccacgggccagtgctgctgcagctgcatgccggccggcacctcgtaggtccatggaccgtcggtgcggtaggcgttaggctgcacggtgaaggtgcagggggcgctgccggtgttgatcatgtccacgtacaccgcggcattggcgatgtcatagcagacccggatctccggcgcgctggcacccgccgcagtcacggcccccacgttgccgcggaaggcgcggtggaagccgttggggccaagcacccacaggtcgtacttgccgtcgtcgctggcaaagacgtcccagctgccatgcagttccttgcccggctcgaccatgtagcggcgcggcacgcggtccaggtgcaggcggtcgtagacgtggaacaccgccgccgcggtgccggtgttgctgaacagcagccacaccgcgcgctggtcgcgggcgtcttcgcgggcgcttacgtgcagctcatagggcagggcgcgcgacgggcgcgtgccggtgtcctgctgcggcatctgctggctgctggccgaaggcagcggcacttgcggcagcacgccttgcgcggtgcggatggcatcggcgctggccttgtcgcggttgggcagcgtgggcagcgggttggtgttcgggctgacgaagttgaaggccgaggtcaggtcgcccgccaccgcgcggcggaagctgctgatattggtctcggccacgccaaagcgggcttccaggaagcgcagcaccgaggtgtggtcggacacctgcgagttgacccagccgccgcggctccatggcgagaccacgtacatcggcacgcgcgggccggggccgtaggggcgcttgtcgacgtggtactccggcctgacctgttgcgggtcgagcgtggtggcgccggccagcgtgtcgccgtcgtaggcgggcgcgcacggcggcggcacgtggtcgaagtagccgtcgttctcgtcgaagttgatcagcagcacggtcttgctccagaccgccgggttggcggtcagggcattcagcacctcttgcgtataccacgcgccctgtaccgggctggaaggcccggggtgctccgagtacgtcgccggcgccacgatccacgacacctgcggcagcttgcccgcggcaacgtcgtcgcgcagcgattgcaggaagccgccgtcaggcatggtgttggccacgcccttgagcagcgggctgatggcgtcgtcggcgctggtgtatgccgggtaggggctgccgttggcctggttgccgcgcgcggcgttggcgtcgcggtattgcttgaagcccgcaagcgggttgtcggtgaagttgtccggcatgttctggtagaccttccagctcacgccggcggcttccaggcgctccgggtaggtcttccaggtgtaggccggggccgaccccgtgaacgagtcgccgctgttgtcgatcaccggcccgccgttggcgccgccggggtcgttggtgccggtccagtggaacaggcggttggagttggtgccgccgtggaagctgcaatggtaggcgtcgcagacggtgaaggcattggccagcgccacctggaagtccagctcggcctcggtgtagtagcccatcgactgggtctgcttgtaggtgggccacttgttcatgcggcccaggtcccaggcgttctgcgcatccgggtacgagtgcggcgtgccgctgacgcgctgcgcgttgccggcgctgctgtcgaggtggtagggcagcacggtgcgggtggtgctgccgttggtataggtctgctgccagacgttcaggccgcccgccagcgggatcgggaagcggtcgccaaagccgcgcacgccgcgcagcgtgccgaagtaattgtcgaacgagcggttttcctgcatcaggatgaccacgtgctcgacgtcgcgtatggtaccggtggcgttgttggccgggattgccagcgcgcggcggatggacggcgggaaggccgccagcgcggcggtggcggcggcgctgccgccggcgagtttgaggaagttgcgtctgctttgcgggttcatggattctgtgccgggtggtttctggaggggagacgggccaggcccggcttcagggtgcgcagcgcagctgcggcttcacggcgggcgtctcgccaggctggtcgctgccattcccctggccggggttgccgccggtacccggggcacccggcgtgatcggtgccgcgttgggcgagccggtggggctgtcgccggagtcgccgccgcaggcggcgagcgctgcgcacatcagcacggcggcgagccagtgcggccgcgccagggtggaaggtcggaaagtcatggtgtcaatctcctgcaggggatcgggcgggggggaagggtcggtgaggaacccgttccgtgacgaaacgggctccggccggatttaaggattcagcgtggacagcggctggcgtgcgccggtgatggccttcagctcgtccagcgacagcacgcgcgtccacatcgccaggtcgttgaagcccatcacgcccttgagcgcgccggggttgttgcccacgtagttgtgcgtggcatcgtcgttcacgccccagccggtgccgagcccggccagcttggtcacgtcggtattggtgatcgccttgttctcggtcctctgcaggcccagcaccggatcgatgacataggcgctgaagcgcctggctgccgcgtcgaccgacagcgccaggtaggcccactggttggccgacaccttcatgccgttgatgtcgtcgcgcttgccgctgccgctgcccaggttgaaacggatctcgcagctgccgaacagcgccacggcaatgccggggttgccgcccgagatgtagttcttgttggacaggatgggctcgccggtgccgttgccctgggcgcagtcggtgcggaaccagaagccgatggtgaactgcgggctctgcgtgatatcggcggcagcgttgtacgccagcttgtagctgtcgacacgcgagtccagctgcagcgactggccgctgaagttgtcggcagccagcgtgccgccgtcaaggcttgccgcccacgggccgagcgtggcggcgttcttcgcatcggcgaacggcttgctgtcgaggctgaagtacgtggccaggccattgagcagcgtcggcgccagcatgaccggcttgacgtagtggatctgcgccaggtacgacaccggcacgtcattgcgcaccagcgtgtagttgaactggtacaggcccgtggccatgttgaaggccttgtcggtgaactgccgcacctcaggtcccagcgaggcgatctgcacgccgtcgcgcagcacgcgggtgacgccgaaggcttcggtcgggttctgccagctcagcgtgatggcgtcgttgtactggctgatgctggcgccgatggctcgcacgcctgcgttggcggtggtcagcgccgaaccgtccagccgcgtggtggccgggtcaagcgccacgccggcgtgggccagcacggtcgggacgagatcggcttcggtcggcagcgccgacaggtccgccggggtgtccggcgctgctgcgccaggtttggccagcgcgccgttgagcgccttgttggtggcgaggaaggcggtgcggttctccaccgtcggcaccgtggtggtggcgccggtggcatccaggccgtggctggtggtgaccatcaccagccagtcttcacccggctgcccctggctgcgcgctgcgacggcgccgagcagctcgcccagcgccttgtcgatgccggccagggccgtggcataggcgccgttgccgaagccgccggcttctgccgcctgtgccggcgcgctgtattgcgcaaacactacgccatagccggactgcacctgccgcacggcgttctgcgtgacgcagctgtcgaccccggcgcagtcaaccagcgtatcgagcatgcccgcttcctgctcggccttgagcaggcccggcagcacccccgaactggtggatgcgccttgctgcaggccgggtttgccggccgcgcgcaggtagcggaatacggtgggggcctgcagtgcggtgctgccggtatcgtcttcgatgccgtggcggttggcccaggcgccggtcagcaccgtggcccagctgggcgcgtccagcggcggctgcgcggtgatggtgccgggcatgccgccggtggcggtgggcaccaggttcagccgggccaggttgggcagctcgcgccgcagcagcgcgccctgcacctgggcataggtggcaccgtccacgccgaccagcagcacgcgcgggccgccggcaccggcaggcggcggggtcttgatggtggtgtcgttcggtgcggttgtcggcgcggtgtcatcgccgccgccgcagccggccagtgttgccgccagtgcggcgatcatggtggcggccagcacacggccgcgcgacatccccgccagcctgtccggtgcaaggttccctgccatctttgattcccctgttcatctgcgttgttgtgcgctgcggcaggtgccgcatggcggattgcgtttgccgcaatgcgctcgcagagtaagaaccggggttgtcaccgtggtgacagcggggcaaagaatgctgatggggctattcggattcttggggtgagggtggcgccagcgtcctatgcctggggcgtgccaacggcatcgcctgcctggatcagcagcaccgcgtcgcgcttgtccaggaggtgctggcgcaggatggccgcaagccgcttgccgtcgcgtgcttcaagtgcctgcagcatctcttcgtggtcgcggatggcgctgtcccacttcggcttctgatagttggagcggaagcgcagtgcctgcagtcgccggttcacagacagataggtctggcgcagcgccgaattgcgggccgccaggttgatgcggtcatggatctggtggttgatgcggtaatagccgggcaggtcgtcatttgcccggcaggccagcatcgcatagtgcagggccttgatctcggccagttccacggtcgtgatgcgttcacaggccagttcgccggaaaacgcttccagcccgctcatcagctcaaacgtgtcctggatctccgccccggacaggcgcgaaacggttgccccgcggttgggcgagatatcgatcaggccctctgccgccagcaccttcagggcctcgcgcagcggcgtgcgggagatgcccagggtctcgcacagttcgcgctcattgagcttcctgcccggttccagggtgccctcgacgatgaacgtgcgcaggtgggccaccacggtgtcgtgcaagcgttgccgttcgagcctgggcagtacgggggccggcgaatccgtgccagaagttgcgacaatttgcattcaaaattcctatcgcgtgattgcgttcaattttagcagacccttaactggaactcaaaaacgcaagtaaacccttgtattgtggggtaaacgctagagaatttcggcgcaatcccggctgttttcccgtcactcctctgataaagtattttgcattcaaaactcaacaggaggagtcaaatgcttaatctcaacttccatcccgccggccgccacttcctgcagatccccgggccgagcccggttcccgatcgcatcctgcgcgccatcagctatccgaccatcgatcatcgcggcccggaattcggcgcgctgggcctcaaggtgctggacggcatcaagaagatcttcaagaccgagcagccggtggtgatctatccggcttcgggcacgggggcctgggaagcggcgctgtcgaacacgctgagccctggtgacacggtgctgatgttcgagaccggccacttcgccacgctgtggaagaagatggccgagaacctgggtatcaagcccgaattcctcggcctgccgggcgtggagggctggcgccacggggtgcaggccgacatgatcgaggcccgcctgcgtgccgacagcgcgcatgtgatcaaggcggtgtgcgtggtgcacaacgagacctcgactggcgtgacctcggatatcgccgccgtgcgccgcgccatcgatgcggccggacacccggcgctgctgctggtcgacaccatctcggggctggcgtccgccgattaccggcatgacgagtggggcgtggatgtgaccgtgtccggctcgcagaagggcctgatgctgccgcctggcatcagcttcaatgcggtctcgcccaaggccatcgcagcttcccgcacggcccggctgccgcgcagcttctggggctgggatgaaatcatcgagatgaaccggaccggctactggccctatacccccagcacgaacctgctttatggcctgtccgaagccctcgacatgatccttgaggaagggctggacaacgtcttcacccgccaccagcgcctggccgaagcctgccgccgcgcggtcaaggcctggggcctggagatccagtgcgcggacccggccgtctacagcccggtgctgaccggcgtgatgatgcccgaggggatcgacgcggacgtggtgcgcaggaacatctatgaccgcttcaacatgtcgctcggcgccggcctgggcaaggtcaagggccgcatgttccgtatcggccatctgggcgactgcaacgacctcacgctgatggccacgctggccggctgcgagatgggcctgaagatctcgggcgtttcgctcgcgggcagcggcaccgttgccgccatggactatctcgccacgcacgcgacgccgctgccgctcaaggctgccgcctgacgcagtcactgccttccgagacgggggcgggcgccgcgcgtgcgcaacgcccccgccggactggtcgcaacggatcagcgcagcactgccgtacctgacaaaaaacagaggagacgctgtggatacaaccctgcaggcgggaacaaagatcaggacgttcgaggatgcgacctatcgcaaggtgagctggaggctggtgccattcctgatggtctgcttcctgatcgcttatctcgatcgcgtcaacgtaggttttgccaagctccagatgtcgcagcaactgggcttcagcgaaaccgtctacgggctgggcgccgggattttctttatcggctacttcctgttcgaggtgcctagcaacctggcattgcacaagttcggcgccaaggtgtggatcggccggatcatgatcacgtgggggatactctctgcgtgctttgcgttcgtgcagacgccaacccagttctacacgctgcgcttcctgctgggcctggccgaagccggcttcacgccaggcatcgtgtactacctgtcgtgctggtacccgtcgcaccggcgtgccaagatcatggccatctactgcatgggctcgccgctgtccggcatcatcggcaacccgctgtccggcttcctgatgggcagcatggccggcgtgtctggcctgggcggctggcaatggatgttcgtcatcgaggcggtgccggcggtgctgctggggtgcttctgcttctactacctggacaactccattgccaaggccaattggctgaccagcgcggagaagcaggtccttgaactggccaagtcggaagacgtcaaggcggtggacccgcaggcacgcgtcggcaaggtgtttaccgatccgcgcgtctggctgatcagcctgatctgcttctgctatgtcactggccagtacggcatcacgctctggctgcccacgttcatcaggtcgaccggtgtcagcgacccgctccatatcggcatgctgagcgcgataccgtatatggcggccattgtctcgatgtacttcttcggccgcagcgccgacaagcaccgcgagcggcgctggcatttgatcatcccgtgcatgatgggcgcgatcggtttcctggcgttgccctgggtcatgcacaacaccgcgctgtccctggtgttcctgtcgatcgccgcagccggcatcctgacctgcacgccgctgttctggtccctgccgacggctttcctcagcggcgcggcgttggccacggccatcgccatgagcaactcgatcggcaaccttgccggctttaccagcggctacatgatcggctacctgcgcgacgtgacccagagcggcaacagtgcttactacatgattgccgggatgctgatgctgggtgcgttctgcatctggacaatacctgcccgcctggtcaaccgatagcgagacaaggcggggtgcggcaccgtgccgctgccccgcctgcccatcatctcgcaaacacttcgcgcccttgccggcgcatggaaggctctcatgacaaactcgtaccaaccggtgccagacggccccggccatcacgcgccgttcagcgtggtggaagccaccgttgccagcgcgcatgccgcgatgcgcgacggcaggctgacggcgcgccaactggccagcgcctgcctcgcgcgcatctcggcctatgatcaggacggtcccgccctgcgcagcatcctgcagcgcaacccgcaggcgctggaagaggccggccgcatcgacgccgtggcgggccgcaaccccacacggccgctggcgccgctgcatggcatcccggtgctggtcaaggacaacatcgaatgcggcggcatggaaaccaccgccggcgccgcctgcctgcgcggcaacctgtccgccgacgatgccttcgtcatccgccggctgcgcgaggcgggtgccatcgtcctggccaagaccaacctgcacgagcttgcctccggcggcgagacggtcagcaccttgtccggccagaccctcaatccctatgacctgacccgcacgcccggcggttccagcggcggcaccggcgccggcatcgcagccagcttcggcctgctcggcatcggcaccgacggggtcaattccatccgctcgccggcctcggccaacaacctggtcggcctgcgtccgaccatgggcctggtcagccgggccgggctggtcccttgcgggctgacgcaggacaccatcggcccgatcacccgtaccgtcgccgatacggcgctgctgctcgatgtcatcgccggccatgacccggccgacccggtcaccagccagggcgcgccccacatcccggcgagctatgccgccagcctcgaccgcgacggactcaggggggcgcgcatcggcgtgttgcgccatttcttcggcgaccaggatgtgcatcgtcccgtcaacgccgtgatgcaggcagcgctggccaccatcgctgcacaaggcgccgagctgatcgcgattgaagacgccatcagcccggacgagctgctcgcgtccacgcttgtgcaccactacgagatggagcgcgatctcgatgcctacctggcggggctgccccccggcgtcccggtgcgatcgatgcaggacatcatcgctgccggttctgtccatccaagcgtggcgggcacccttaccaccgcggcagcgctgagcgagcgggagggggagtaccgcgaacgcctgcagcgccagcaggcattgcgccagcggctgcaggacctgatggcgcggcatcggcttgacgcgctggcatttccgcaccagcggcgcctggtggcgccggtcggcgagacccaggcggagcgcaatggcgtgctcgcgtcggccaccggctttccggccatcgtgattccggccggattctcggcgccggacggcaatgccccccaaggcgtaccggtcggcctggagttctttggcctgcctttcaccgaacccgtgctgatacggctggcctatgcggccgagcaggccttgcgcgcgcgccggccgccgcattcgacgccggcgctggaataggcgcgcgccggaacgacgttttatcgctgctctacaaacgcccgccggacacggcggcgacaaggtcgcggacatagcgcgacaacctcgaaacgaggaggagacaaagatgggcgcagaaacagtagttcaatcgccgaattccccacagcagcatgagctcgaccgggccatggatggcatcggggtgacggcatcgcacaagaagatcatcctcatgatcatgctcggggtgatgttcgatgtcttcgaacagaacgccgtcggcctgatcggccccatgctgcgcgagcagtggggcatctcggtggcggagatcggctttctcaatacgctgaccttcagtgccgccgcgctgggacgcatcggctccggctatatcgcggaccgctacggcaggcgcacgatgctgagcgccaacctgctgctgttcacgctgggcgccatcatctgcgcgctggcaccgaactatggcgtgctggcggcgggccgctttatcgtcggtatcggcctgggcggggagatctcgatcgccgtgaccatgctggccgagctgtgctcgacgcgcttccgcggtaccgcggtaggcctggtcagcgtaggtagcggtggcctgggcaatatgctggcgccggccttcggcctggcggtcttcgccatgttcccgggtccggacagctggcgctggctctttgcctgcctggtgctgccggcattcttcgtcgtgttctaccggcgctttattccggagacgccgcgcttcctgctgtccaaggggcgcgtggacgaggccaaccgggtgctgtcggtgctggcatccggccgcctgggcaagctcgacggcgagccgacgccctatatcaaggccgcgatccaggacgacgcgccgcgcaccagggtgcgcctgagcgatatcttcaagggccgcctgggacggcgcacgatcgcgctggggattgcggtgtccatgacgtacggcgcgcagatctcggtgctgacgctgatgccgaccatcctgatgtcgcagggctacaccatctccaagagctttctcttcaccatggtgatgcagagcggcagcctgttcggggcgctcgcggcctcatactgcggctatcactttccgcgcaagcgggtgctgacgacaggcgcggggctggcctgcgcggccgggttgtgcttcggcttcctgacgtataacgtgggcctggtgctgctgtttggcgcgtgcttcacgttctgcgtggtgttgctgaacacgtcgatctggatcttcgcgccggagcagtatcccactcacgtgcgcgcgttcggcacctcgctgatcctggcgctgggcaccctggccggcgcgctgacgccgctgatcagcgggcgggtgttcgaaacctacggcgtcggcggcatgttcagcatgctcgcggcgatgtacgcagtgtttgcgctggccgtgcagttcgcgccggaaaccttcggccgcgccatgggcgagaccgccgccgacgacgaagccgtgcctgccgtcagtggcaccgcggccagcgccagcggttcctgagaccggcccgctcccggcagcgtgctgcgcgcgcttgcggggagcgggataccgggcgatattcatccctcattcaaggaaatacccaaggcatgacatcttccaatatcgatcgggtcgcgcaggccctgctcagcgcgcgtagcgaacagggctgcgccgatgcagagcaattcgccaccgtgcttgagaatgcggaacaggcctacgccgttcagtcggccgtggcccacgcgcttggctggcaagcgacaggcgccggctactggaaatccggcggcgcctcgcgcgaggcggtgctgacgcatgcccaactgccgccggccggggtctggaccagccccgcgcatgccggcgactggcctttcacatggcgcggcatcgaggcagagattgcgttgcggctggggcagggcgttgacgccgcgcaggctgccgccctcgactacgccggcgcggccgggctgatcgatgtgatggcggtgtcgattgaagtcgtcgattcgcgctggcggcagtacctcgccgcgcccgcgctgctgaagctggccgacctgcagtcccacggcgcactggtgcttggccagtggcgtgactatgcggcgcgggactgggcggcacagcattgccgggtgcggatcggcacgcaaaccatcgagcgccgcggcacccacgcgctgggcgatccggcctttgggctggccgcctggctgcgccacgccacgcgcgacgggcgacgcgtagaggccggcacggtcgtcaccaccggcacctgggtcggcatcctggacgcatcggcaggcgacctggtgaccgcggagttcgatggcatcggcgaggcctcggtccagctctgaggacggcgttgcccttgacggggcgtcagctgcgcaagccgacgccctgcatgatgatccgcagcacccacgcggccatgcccagtgccgccacgctggcggcccagatcagcaccagccagccgatgcggcgcagccaggtgccggtccccgggcgctgtgtatccatatccatcagtgatagccctcgccgtggcgcaccttgccgcggaacacgtagtacgcccacaccgtgtacatcaggatgaaggggatgatgaacagcgccccaaccagcgcaaagccctggctttgcggcggcgcggcggcgtcccagatcgagattcccggcgggatgatattgggccagacgctgatggccagcccgctgtagcccaggaacaccagccccagcgcgtacatgaacggcgagatatccggctcatgccgcagcacgcgcatcagcatgaacatgcacagcgccaccaggatcggcaccggcgagaaccagaacaggttgggcaggctgaaccagcgctcggcaatctcgggatgcgtcagcggcgtccacaggctgatcaccgcgatcaccgccagcagcagccacgccagcgagccggtcagcctgatcatgcgctgttgcaaggcgccctcggtcttcatgatcagccaggtgctgcccagcaccgtgtaggccaccatcagccccacgccgcagaacagcgggaagggcgtgagccagtccagcggcccgccggcaaagcggtggccctccagcttgatgccgtcgatataggcgcccagcgccacgccctggaagaaactggccgtgcccgagcccaggatgaaggcggcgtcccacaccgggcgctcgcggtcgttggccttgaagcggaactcgaacgccacgccgcggaagatcaggcccagcagcatcagcatcagcggcaggtagagcgcgctcagcaccactgaatacgccagcgggaacgccgccagcagtccggcgccgcccagcaccagccaggtctcgttgccgtcccagaccggtgccaccgtgttcatcatcacgtcgcggtcatgccggtccggcacgaacggatagagcatgccgatgcccaggtcgaagccgtccatcaccacgtacatcatcacgccgaagaagatgatgaagatccagagaagcgagaggtcgatgcccatggtgtcagctccgggtgcgtgcagtggtggcgggggcgagcgcttcgtcgtcatccacggccgacaatggccgtgccggcgtatgcccgcgtccggggccgccttccggtttggcttcttccagcgccggacccttgcgcaccagccgcatcatgtaggcgatgccgacgccgaacacgaagaggtaggccaccacgaagatcgccagcgtcgttgccagttcgggcacgccgtgcggcgacaccgcgtcggcggtgcgctgcagcccgtagactacccacggctggcgtccgacctcggtggtgaaccagccggccaggatggcgatcaggccggtgggccccatccacaacgccatatgcaggaagccgcgcgagcggtacatgcgctcgccccggcgcagcagcaggctccacacgcccaacaggatcatcagcagccccagccccaccatcacgcggaacgaccagaacagaatggtggaattgggccggtcctgcggcgcgaactccttcaggcccttgatctgtccgtcccaggaatgggtcaggatcaggctgcccaggcgcggcacctcgaccgcgaagcgcgtctcttcgcgcgccatgtcgggccagccgaacagcagcagcggcaggccttcattgcctttgttctcccagtggccttccagcgcggcgatcttggcgggctggtgcttgagcgtgttcaggccgtgcatgtcgccgatcacggcctggatcggcgcgacgatcagcagcatccacatcgccatcaacagcatcttgcggatggcggggttgtcgcgcccgcgcagcaggtgccaggcggcggacgcgccgacgaacagcgcggtggccaggaatgccgccacgctcatatgcaccaggcggtagggaaacgacgggttgaagatgacttcgaaccagttggtcggcactacgcggccgttgatgatctcgaagcccgccggcgtctgcatccagctgttggaggccaggatccaggtggcggagatcagcgtgccgagcgccaccatcaccgtggcaaagaaatgcagccccggcccgacgcggttccagccgaacagcatcacgcccaggaagcccgcttccaggaagaaggcggtcagcacctcataggtcagcagcggcccggtgatgctgcccgcgaactccgagaagaagctccagttggtgccgaactgataggccatcaccagcccggacaccacccccatgccgaaattgacggcaaagatcttggaccagaagtggtagaggtctcggtaatgcgggcgctgcgtgcgcagccagcagccttccagcaccgccaggtaggcggccaggccaatggtgatcgccggaaaaatgatgtggaaggaaatcgtgaacgcaaactgcgtgcgggcgaggtctagcgcggtcaaaccaaacattgttgttctccgtggcgctggcctggcgcacgcctgggacgggcgcggcgctgccgtctggcaggccggggctggtcggcagggagcgccggggcgcgggccgtaggcgcgtgcggtaagagtagtgtacgccgcgcgcgcagcaaagggcaccgttgctgccggtggcgtacgggtgacatatcgccgcaccccgtgccgccggcgccgcttcacgcggcccgttgcccttgtcgatggcgaccatgctaacggagccgaaatgaaccgaacagcatcacctcattgaaaaaataccgtatcagttttgcgcggcgcagcagaggcagcggctgacaagcaaggcaaagaagtgcatagtcatgcgcttcccagaagcctttgaacatcgcgtccgccactgcctgacgcggccccgcttgccatggattccaccttgctgatcgtgatcgccggcgccgccgtggccggctttgtccaggggctgtcgggctttgccttcggcatggtggcgatgtcgttctgggcctgggcgatcgagccgcagctggcgtcggccatgaccgtgttcggcgcgcttaccggccagctgctggcggcggtgtcggtgcggcgcgggctgtcgtggcggaggctgtggccgttcgtggccggcggcgtggccggcatccccctgggcgtggcgatcctgccgatgctcgacgcacagtggttcaaggtcgtgctcggcggctttctgaccctgtggtgcccggtgatgctgatggtgcgcaagttgccccatatcggcgtgggcgggcgcgtggccgatggcgttgccggtgcggccggcggcgtgatgggcggcatcggtggttttaccggcgtggtccccacgctgtggtgcacgctgcgcggcttcgacaaggacgaacagcgcgcggtgatccagaacttcaacctcgccacgctggccatgaccatggccgcgtatgtgggcaagggcatcgtcacgcgcgagatgctgccgatgttcctggtggtggcgcccgcgatgctggtgccaacgctgctgggcacgcggctctatctggggatcagcgaggccaccttccgcaaggtcgtgctgacgttgctgaccgtatccggcgtggcgctgctggccacgtcggcgccggtgttgatggcgcgtgcgggctagacggccctgacctgcgccgcagcctcgcgcaggcattccaccagctggtcggtgccgagcgacggcgcccgttcgcgcagcgtgatgatgccgaccgggggcaggtcgaccggcacggccatcttcagcacgtgcaaccggccttcctcctgcaacgacagcgccaccgactcagccatgaaaccggccgcgccgcgctggccgacgaaggtggcctgcgccaggtaggacgagcaagcccctcaaagaggcacgcggcgaggtacagtacggcgcgtcctatgtcgagtggtttgccgaagaggccacccgcatctgcggcgatatcgtcgccgaagccgagcctggccgcaaactgctggtgctgaaggagccggtgggcgtggtcgcggcaatcacgccgtggaacttcccgctggcgatgattgcccgcaagatcgcccccgcgctggccgccggttgcacggtggtggccaagcccgccgaggacaccccgctgaccgcgctggcgctggtatggctggcgcagcaggccggcatgcccgcgggcgtgctcaacatcgtcaccgcatcgcgcgagcacacgccgggcatggtcgatgcctggctggccgacagccgcgtgcgcaagatcacctttaccggttccacgcccgtgggcaagcacctcgcgcgcgaatcggcggccacgctgaagaagctgtcgctggagctgggcggcaacgcgcccttcatcgtcttcgaggacgccgatctcgatgccgccgtcgatggcctgatggcgttcaagttccgcaacggcggccagacctgcgtgtgcccgaaccgggtctatgtgcacgacaccgtgcacgacgcctttgtcgagtgcctggcacagcgcgttggcgcgctccacgtcggccccgccacggaagaggccgcgcagatcggtcccatgatcaatgcccgcgccgtcctcaagatcgcacgccatgtggaagacgccgtcgcccggggcgcgcgcgtggtcaccggcggcaagcgcgtgcgcaccgccgacggcccgcactactacgcaccgacggtgctggccgatgcggcccccgcgatggagctgtcgtgcgaagagaccttcggcccggtcgcgcc

SEQ ID NO: 3 - DNA, 418044 bp, Cupriavidus necator
  source 1..418044: mol_type = genomic DNA
ccagtcagcgtccatgtctgcattctgcgtcgatagcttcaagaactcggtctaccacctgcaaggtatcaccagcaaccaagaaacgatcggtgttgctaaccgagatggctattgcgtaatcaattttggactgtctaccggcgcgaacggcagcggctacggccttccgtcgtggggtggccagcaacttcccgcgggaggcatggcctactcgcctgttgacggcgaacgagttgttggttcctttacccctgctggtgagtcccctaacccggctccggatttgactgctgccggacatccaatcatgttccgcgtccccgctccggaatccaccgatgttctgactgtgtcgaacttttcgctggctggtcctggtggcgctgtggtcccggtgcgcgttttggttccctccaaagcgaagtccggatctgtttcgaacgccgtcgaggatgcccgcctgtttgccggtgtggtgttcatgcttcccacccagccgctttctgccggcacgtacacagcaacatttagcggcgcccgcaatggcattgcaatcaacaaatcttggagcttcaccgcgttctgaagcgatccccgtaacaggcaagggcccgcagattttgcgggcccttttgtttttccttgcttggcggatctgcgtactggagtccggtattttcgggctgccattacttcctacaaacttcgtacacaccgagtcccatgttgttgccgttgcttaggtagctcgctttgttagttcccacgcgatatccgctggcgtcaatgccggccgacgccagagaattcagctccggccactccatgtagccgctccacatttgagaggctacaacgcttccaccccagagaatttgataacccttgccctcgcagccgccatcggccgtgcattgacccatatcgccaatagcaatgctataggcacccggcgaatactggcaggccggcggcggtggcggggcacagcaaggcggtggcggcggcgcgggaggaatcggtgtatcgcagtatggcaagccattgctccgccgcatccagacctggccagctcgacagtcagccacggtcatcgccggcgccggaaacgaatagagctgtgcctcggctgcggaaaagctagccatcaaggtgcacgctacaaaaatgcgcttcatatttgattccttaaaacgtacagcccgttgtgaccgtgcccactagttgccctccaagcgcgcccgtatcgttgccgctataccaggccgcaggagagatagcgctcgcttgtgcgtaccagaaggtcccgttgtcgttcatagagaagaaggtgccttgaatgggaggtatcacgttgccggtgatattcaccatttcctgcttcggcgtgtacatcgcccatgcagtaccacccgggcagttatccttaggaaacgtcatgccgtccgtcacgttttcaaactttcgagtgacgttcatattccctaacgcgttgttgagcgtgatataccggttgcctttgcacacgtagccaacattggtcgcgctcgttgcgatctgaccattgtttccgcaacctaggccttcgaagatgtttgctacagccgtcccaaccgcctgccatatgccccctgaacagatcacatggccggtgcctgaggtactcctgcgggtagaggtatcaaccgcgcacgcagtcccgggggcgcctgtactagtgagataagtgtcgccttggctggtcaaagccgttgtcgccgtcacccgacctgcgttgttcacgtcgttcccagccatgtcaatcgacgtctgcatccgatttagttccggatgacccggaacctgcgcccgatacaaatagccgttgttggcctgcacgccggtaaatgcgagcaacgacgcaagcctgccgcttccggggttcgtgtagttcgccagcggaacttgccacgccccatacgctccatacgccctattagccaccatcgtcggatcgccgttctgccccgcgtagggcacgaagccaccctgcgcgccggcctgcgcagcgatctgcacgagctggcgggtgtccgtgatcgcacgcccaccttgggaagtgacaagcgcctgcaggttgttcggcgtcggttgcagaacctggaggagccacgtctggccaaacacgttggtcgccgagaatccggcagggagatagccgccattgatcagcatcgccggcgtaatgttgacgggcacgcttggcgtcgcctgcgcgaccagtgtcgccgcctcgtcctgcacgaactgcagggctgccttgtcgaacacaagcatctggctcgccgcagccgcggtctgcacgttcgtgacacccgccttcgcccacgtcacaaagccggcaaagctcagcatcgagagcatcagtgcgatgagatatccgagtatggcttccatgcaattctcaggtgttcagctggacccaatgaaccagcgccccaacgggaatggtcgaaggcacgctgtatgcgatgccggtggaaatattgatggccgtaccctggctacggacccggaaccacgcgagactgccttgcgtgctcccaagcagcgcggcgccggcgcctgacttaacgcggacgtagccgtacacgtcgcgcccgccacccgggttggctacggccatgcagcccgcaccagtcggcgccgccatcccggagggcagcgccgggatcaggctggcaccaacgaggccaggcgttgcgtcggcggtcgacacgcacgccgccccataggcctgggcctgctgcgcggtgaccgttgcgacggagtccatgcgtccgggcacgccggctcccggcgctgcttgtgatagttgccagctctgcgccacgatgccaaggctgaacaggaccgccgcgatcggcaagatgagatagcccatagtctcctcctcagatagtggcgatagcgccggagatcactggaaagtgagggtgaaggtggcagtcgcgctgcacacggcgccagcggtcgcctgatccggcaggttcgcctgagtgaacgtggtggttcccacggccagcgagacgtagtcctttaggcccatggccgtgctgacacactgcttcgcagtttgggcattgcctccgccgaatcggatcacgccttgtgagccggcacttgcggcagacaacgtcaccgcgttgccccatggatccaagagcgtggtgccgcgcaccatgtcggacgggaacatcccgccggtgatcattgccggaatgttggcagtggtgaagttggtgtacccgttgctcccctgagagaagcccgcgcgggcgttcgtgatcagctgcgagatgttggtggccaccacgcttgccttgtggttctggaagccgttatagcctgcataggcgataccagcgagcgcgagcaggcccagcacgatggcaacgatccgcccgagaatcccatccatgtcatttccccaaacaatgcacgccctgatttgcgacgcttcaccatcgtggacgcgataccgctggtggagcgtagtttccgatgcctggttactgaaacgtgagtgtgaacgtcgaggtggcgctgcatgccgcacctgcggtggcctggtcgggcaggttggtctgattgaaggtcgtcgatccgatcgccagcgtcacgtagtccttgaggccaagggcggtgctgacacactgttttgccgtctgcgcattgccgccgccgaaggtgatcaccccctgcgatccgctattggccgacgcgagcgtgaccgcatttccccaggagtcgatcagcgtggtaccgcgcaccatgtcggacgggaacatgccgctcgtgatcatcgatgcgacgtttgccgtagtaaagttggtatagccgttgttgccctgcgagaacccggcgcgagcgtttgtgatcagctgcgcgatgttggtcgccaccacactggccttgtggttctggaacccgttgtagcccgcataggcaattccagccagtgcgagaaggcccaagacgatggcgacaatgcgcccgagaatgccatccatgtgaagctcctaaatgtgtatgaataacggcgattgttagaactggcccgtcgaggacgtgaggatcgatgagagtgagttggagcctagctgcagcaccacgaaagcaaggaacatcaggccggtgaagatcgccgacatcaccatccctttggcgagcaactggcgttcgatgacttcggcgttctgacgcactgcgaccgtgatcttttcggtgaagtcatcaaagcccgcatacgcgccgacctcgtcgatcaggtccagcgacggaaacccgttcccggtctgccgcatggattccgccaggtccaggccatcggccagtccgaggcgaatcggtctcagacgagaggccagccatggcgatgccgagccgatctgtccctccagcgcggcaatgtccggcaccttggcccgcaacagcgccacaaacgacatcgcccaggtgaagccggtgatttcgcggtacgccgtgaacgggaacacgtgctggtcgcagaatcgccggcccgggccggtccagcgcggcagcgcccaccagctccagacggcataggcgccgagactcccgaagatcaccggtgcaggccatcccaccgccaactggcccatccagtacatggcataggcccagtcggtccacttcccgatcggcaggatgtcgagaaactgcggcacgatgtagccaccgatcagcagcaggacgacatacagcgtggccagatacaccgttggcgcaaagaagctcgcctgcagcttccggcgcagccgcgtcgtcagctcgcgcacatccagcaccagccgcatggcgtccggcagttgccctgccttctcgccggcgtccagcacgctgcgttccagatcgctgagactcgtgcccatcgccgccatcagcgccttgccgtcgcgcacctggcgcccgacctcgtgcgcggcctcggctgcgcgcttgcggcctcgcctgtcctgccgctcccggaagtcctcaatgacttgcgcgagggtcagcccgttctccaattggctcgatgcctgttgatacaggcgccggcgcatggcccaagacaatccgctcataggtgctcccgcatcggaatcgcgtcaacgcttccctcagcgtcgaccgggcacagacgaccggccagcacgagatccatcgcgtgcgcaatcatgggcttgtccgatccctcccggcgccgatgattgcgccgcgcggccaagacaccgtcgtcgatgaagtcctgcatcagttgctcgctggtgacgaccacctcggcaaccgcctgttgaccaatgatggcttggccgtggcagtgatcgcatccgctcccgcgaacgcgcacctcagacagatccccccacgagcgcatcgcattgagcatgtagtccggcagcggctcagacgccttgtcgagggtgaccgagcatttcgggcagagcagcggcacaatccgctgtgcaatcaggccgatgatctgggtgtgattggcgatcacgtccatagccagacgaacgtggtccagcatcaccagtcgggagaatgtctcgaacgggtcggtcacgtgcagcgtcgtgagtacctggtgcccggtcgccgccgcctgcagcgtcgcgatcgcctcctcgacgccacggatttcgcccagaagcaccgcatccgggtccatccgcagcgtcatgcgcagcatctccgggaaccgttcgctttccgtcgtgagctggatcgcccaatccatcggatactcggtcgggttctcgatcgtgatgagccgcttttgagggaagaggcgcgcctggtgccgcgtgcactcaaagagagtcgtggtcttgccgctcccggtcgggccggtcacgacgatcacgcccatggggcggcgcagcagctgcgagatgagttccacctgcagcggcgtgtagcccatctggccgagcttgaattcgccgcccggcaccttcggcgtgcgaaggtccagccgcttagccgcatcgatggcatccgccttcagtgcgccttcgtggtgctcccggtattgcagccgcgcaacaaggaagccgccgccgctctccaccgggtaggccggtccgcgcacgatccgaacactcgacagccccgtgcccggcagcgcgtcgcccgcgatctgggcgtcctgcacgtccagtgggttgtaggtggccgccttcaccgtggcgagaccggtgtatatggcacggatcaggcgttcgccctcctcgcggcgcattgactgggcggaaactgtccgtagatcgcccttgattcgtacctggatctcggtatggtcctcgcgcaccaggatgtgaatgtccgaggcaaccagaatggcgcaatccgcgatcagccggcgcgcgagggtcagggtctgcaggtcggtgtcctgctgctggccggcgccgcgctgctgacgcagcacggcaagctcctgcgcggacaccttgcgcacttgcggagccgcaccgctgcgccgcaccttggcttcccaggtcagaagccgcggcgtgccgaaatgcctggcatccacgtagatgtcgcagccgtgcaccgccagcacttgctgcacgttgtcatcggtcaggcccagctccctggcgacatcctccacgtgcagcccgctttccgcgacgcgttgacgaagcgccgccgcttggtcagccgtcagatggtcgaggttgcaggcaacacggtcgaaggtggccggcaggttgcggggatagaggatatgaggctcaagcacctccggaggcttcggcaacgcgagcgcatcggacttcaccgacggctcggcccgggttgcaaatgcggtgcctcgtgccgacttactgcgtggactgcgccacagacgagagatcgtcgcgatcattgttgttgactcccagcaggcggcactgcgccatcccgcattgcatatagccttccggttcctttccatgcctgggcggccccgtcgtagctgacttccgtcagtcgcagacccgccaccgcgtccaacccctcgcccaagcccaaccacggcggtgcaccgaagccaaagtccgccgtcattgcgagccacggatcaaccggcgtgttgccatcggccggaagcagaggcggcggcgaggtcagctgcaagcccacgccggtaccctgtgcatacgtccacatcgaacgctgcgcttcggcaggccgattcaccgcgcgcgacgaaggcaggaaagccgccggcgcatttccggtcgccgtcgcttgatttccgtcggcggaaagcgcgcccggcgcgttggctgccaaaccgccctcccgcttccaggtaatttcgatcgtcagggccgtcgacgtggccggcttgcagcgccagctggagagcgtccagcccgcgtccgcgagggcctggcggtcccacgcgcggcggcacgcctgcaggaaggcggtcggcgtagcttcatcaacccaaggtaccgcccgttgccgagcagcctcattggcacgctgcgctgcagcgatcgcgcgctggcgcatcaattgcgcctcgcgctcagcttcctgctgctggtcgtaccagtaccacccgcccacgaaaagggccgccacgccagccgccgcagcgacggtataggaagtcgacttccaagggccggtcaggacgtctcgcatagctgacacgcccttcgacgcccgcgccatgttcgcgagatcccgaaccgttccctcaacctccgtccattcgcccagggcacgatgccgctcgcggaccggtgccagttcctcgagcgtgccaacccggtcgccaccggcgatgacggcgtgcccctgacggacggcgatgtaccagtagaggctgccctgcagatgaaagagccccctccaaggctggcggtgctggcccgccacgatcgccgcgagcggcttcagcccggccggcttcgcgccggcgatcgcttcgcagaaaccggtctggatggcgccttccgcgctttcatgcacgacgccccagcgcacattgcggccaagttccagcgccctcgcgcgcaggacgcttttgctcggctgcttttcctcgtgatgccaggtcagcccgatggcaaagccacctttcagtccggggaatgacaggatctccgccatcgctcacggcctcagcgtgcgcacgcgcttgccgttggcaagctttaccccgccgtcgtcgatgctcacgaccttccagccaccgtccagcgagtcgccagcctggaccggcaccgtgcggccgctgacatccactacggcgttgtagtgaccatcgaatgcgcgcaacgacaccagccggggcgcttccggcgcgagccgcggtgctcgctctgcgacgccgcccgtcggcattgggccgcccagcgaaaccgacggcacgcccgctcccggcggcgccccagcaggagctgccaccatggaatcctcggcacgcttcacttccgccttgaacttggcgatctcggcgcgtgccttccacaaggccagttgggactgcaacgcagcgagttcgggcgcgtcagtggtgcgcgacggttgtgccgtctccgcggcagccgctgtgggtgtcccattggccgccgctgggctaccagccaccggctgcgccgccgagccggtccccgcttgcgacgtcactgagccgccccccgccgatgcgatcgccgctgcaacagggttcgacatcgtcgacgccccatgggcagggacggtcaccgagaggccgatggtagcggcaatggccagcgcggccggggtccaacgaagattgaatgagcgattctgcatggaatggtctctctgttacagcaagcgggccgagatcatgatggcgatgaccgtgtctcccttgagggcaccaaccccgccgccgagcgcagccatccacggctcacccacgccgttgttggtcgtggaggccttctggttgcgcaggccggtgagtaccagcgattcgccgggcttcagggtgatcgactgcgtgaaccggttggtcggcatggtgcgcagctgcacgctggtctggttcgcatcgccgcccgagttgaatcgctgcagtggcagcaggtccgacagcgtcatgtcgaaattcatcaggatgcggccatcgacaaccttcggcaggaagttgctggtgaagccgtaggtcaccgttccggtctgtatggaactggtggaacccacgttggcagccagcgttgtttgcgactgcgcgacatagtcctgcagcgtggcggtctgcagagccagcaccttgccgttctgcgtcacgcccgagcgcgataccacctgtgacacattgccgagcgtcgaaagcgcttgcaccacggccttgctgccggcgaaaggaccactcatgatcgtcgcgccaagattcatggcggtggcgctccctgaaatcgtgggcgtgctgacggaactgaacgagacgtcgggcttaccgctagagctttgataggcaagcgacaggttcaggccaaaattgtcctcgcgcgtgacgcgcacctcgtagacctgtacgtcgatggcgacctgcttgccatacatcgccacgaggctcttgacgaactgctcaatgcggtcgcactgcacggggtcgccggtgaccgtcagggtgccgagattcttgtccaccacgacgtcggcgctcgcgccagcgactgccttagcggtcgcctgcagcgtctcccagggcttcatctcggtcgacatcgtcatggactgaccgcttcttcccgccccgcttccaccagacccgccattgcctccggcgccggccgtgccgccggaactgctgtccgacgtcgtgatcgagccattcatggaggacgaatccgcgaggctcggcagcatgaaggtccgggtttccgtcctgaaaaacgagaccgtgccgtcgttgtaacgagaccagaccccaaagtgcgcctcgacggcatccaggaagcccttgaagctgccttcgtacctaagggtcaagggcacagacagcgccatgccagcaccctggcccgacgcagacgtgccggccagcgaggtggccaggtccacgcggggcgtgccacccatcgggataggaccagtcggccgcgcagcgccggccggctgggtcggcgcggtgccagacacagaggttgcgacggcggatgcgtctacagtcgcacgcacgccgatactctgtgcgatccagctcgcggcttcggtcaacgagcccagcgtgcccctgaacaccacatgcttgttgtagatgtccggctgcggcttgctggctcggatcttctctcccatcagccaggcgccttcatgcacccggaacaccgggcggctgcgtggtgcatcggcgtaagccgcgtgcgcgtcgctgccgatggtgtcctgcaagttgcgcgtctccatcacaccgcagccggacagcagtgttgcagccgcaacgatagccgccgtgtagcgcgccgtattcctcatcatttgcatcatcactgaaccatcccgttttggctgataatcaccgtgcgattgccgcgccagctatcgcccaccacgtccgcaccgttgttggccagctcttcgaccacgcgcttgacggcgctttcgaagtcactgccgtagtccttgtcgccgggcacaatccagccgtccgggacattccatgcgacggtccaaccggcccgattcgcccagttctgtagctgctgttgcagcgcctcccctttgacaagccggaacgccgcaccgaccgttggcgcggcacccggccctgccggcgtgctcgccttgttaggtgccgcggcgaccacggagggcgtattcgcggccagcatggtcgggttgacggcagccttgggggcacgaagcggctgcaggtgttgccagccgtcgttcgagagttgcgaggcgtgcaccgctggcacaaggatcaggccgctcagcaacgatgctgcggcgacagcaatgcgggtggttcggttggattggcacatagctatgcgttcgattgaggtgaaggaactaccgcaaggcggcgcgctgcagcgcctgccaccgcgcatgaatctggttggcgtagcgcaactgcttgtcgggtgaggaggcgttgtaggccccgaccgctttccacgtcggcccgaagcgctggatgttctcgcgcagaatccacgcgccgacgtaggcgttgatgcatccatcaaacaggtgggcgcgcgtgatgccgtaccggctcagccgcggcaggtggatcgaattgatctgcatgagcccgatatcctccgacccgttcgcgtttcgactcgtcacccacggccgcatggtggactcctgcatcgcgatactccgcagcagagatgggctgacgccgtgaaacaccgcggcatcgtccaggcagtcggcatgggcgacgccggtcagcaagaccgtgcagacgaccgcgatcgcgcctatcctcacagcgccacctttccaggctgctctttgaaccggacctgcggcacacggtcaacgtagaccacactcccatccgcgatcacggtcaggcgtgcggcgatgccgttgaacctgtagtagcggtccttgagttcgccgttgcgctggtgttcatcgccgaacaccgacacgctcaccaacgacttggcaaagctgagataggtcgcaccgtccttttcgaagaccatttccagaccggcgccgttctggttcgggaactcatagtcgatctccggggtgcgcgtcacgtcgacagacttgccatccgccgtcgccgtgaagcgatcgaccgtggcgaaggacagtacgcgctgggcctcgtcccaccgcgtccagatcttgctgtcggatgcgtcccgcaagactagatccttgggctcctgctcgaatcggatttcaatgcggccctgcttcgtgtcgcgaatcgccaaggcaccgaaggccgatgccagtgtcgggccgtcaggcagcggtgtcccggctaccggcgttaccgcatctacatggccagcaggcagcgtgtcagctgtcggcgcagcggcttgaagcttcccgtcaggggttgcggccgcgacgccgccctcgaccacggcgaagctcttcggcggcccggcgcgcagcgcgatattgcggcggctgaagtccacttccgcatagagattgcgctgctcgagcacgcgggcgagtgcctgcagccagttctcgccgtcgcgcgtttcgagggtcacctcttcggtcaaggggatatccttctgcgcggtgccgctccagcctgccggcgcaatcgacttcaccagctgcgcgagcggcaggttcgaacggccagcgcgcaccaggggctggctggcatagctgccgatcagtgcgaggcgcccagagattgcggcggggctacgggccatctcgcccaccggacttactggctccgaggtaaagccgttcgcacgcttccagcgtgcgaccaccggctggccgctgaccgaatagcggacgacgtccgggacgccgtcgatcacccagtatgggccactctggatggcgccatcggcctgcacggcctggccatgtcgcggctggatgtaggtcgacagcccatcgttaaacaccatggcagggcgatcggcggcgcgcgcgacgacctgatagtcgaagtccagcgggtcggtgtcggccgccatggcgtgcgtcgccaccagtgcaagtgcggagaggattagcggcctgatcatcggaattgcgcgacgtgtttcatgaatcgggagaagtacggcccaccgcgctccgggttcgcgctgtggtaccacgccaccgccttcatggcggagccgctgcgttgcaggttctcggtcagaatgtcttccgccacgcgaatgttcgtggccggcgcaagcgcctcccatggcgaagcgaaccgtttgccgtggtagcaccagttcacctgcatcagcccgacatcgaaatcgcagcgctgattggcgagcagccggttaatggccgcatacgcttcctcgcgcgtcgagaagaacatgccgcgaccggccacattgagcgtccacggccaggggcggccgcggtaggacgactcgttcatggcaatgcccgccgtgatcctggggtccacccggcttcccatctgcgcgaacggctccgtcttgggtgcacacgcccaaccgccgcgtcgctcggccagcgcttcctgtgcggcatcattcagcacgggtgggcgcaaccaaccctcacgcacaaacaacgcggcgatcggtacggtcttgccggcaagcgtgacgactgggcctgcctccgcaccgggatcgatctgcgcaccgagcagacgcgccgaccacccgaggaatggttcgagtccgcaatacaggaccggtttgccttcgagggtgtgcacccgcgcctggccgtccaccttcaccacaatggcgttcgggctaatgaccgcgtccatcgttgcagcttgcgcggcaagcgatgcgacggcgcagacaacgaatgctgcgaaccgtttagtcacgataggcctccagcacgatgtcatgcttgacctggaccatcatcctttgcccgggatcggtcgtgatggtcggccggatattctggttgcggttcaggatggtctgtgccgtctgcgtggcaatttgacccgcggcgtttccataagcgaccagaccggccggcccgacggtggtcgtcgtcgggttatcgttgaaacgaagcgacagcgcaccgatcaccagcgcaccgctgaagatcctcaagaagtggttattgacgtcgccgctattaccggcggtcccatctggatcggcaccctgcatccccaggagcggcacggttttgccgttgggcagttgcatgcgcacgaacgccgtgagaaggcgctcctgcccgacagcaatgtccgcgctatacataccgaccagcgtgctgccggcagggatcaccttgcaggtaccctgcacggtgtcgtagatgtcctgggatacggtggcgcggaactcgccgggcttgtccgagttcaggccaccggcgaacgttgcggggatgacgaagcctcggctgaccgtgcattttggcaacttgccatcgaagccggttcgcaaggtgctcatgctgccggcgtcgcgcaggaactgccggtcaccggagacttgctgtggcgtcgcgttgtcctgtgcaagcgcggccgcattcgccgcgccctggcgagcggccaccgcttgctggatcgcacgcatttgcgcagggtccgagacatccgcaatcccggcaggcacacgcccttgattcagttgagacttgcgcgcgccggacttgaacaccggcgccgtgaatagatcatcctcctcgttcttcttggcatctaccgtgggcgcagcttttccaccgccgttcagatcggcagcagttaataccggcttcttggtgtccggcacaatggcttccttgcgctgcttgtcggcttcctcgcgggccttgtccgcctgagcgcgaatcgccgcctcaaggctttgcccagtgtcagcattgcccgcgcgctgcttgatctgatcggcacgcgcctgttcggccttcgcttcaagctgctcgtccgtgatggtctggaagtagtagcccaggacgcccaccagcaccgccgtgatgccgccgagagcgaacatcacgttgcggggcagcttccctttcacggttcgtacttgcacatcgctcacggaagctgcattcggatccattttcgaggcgcgcatcagaacaatcccagaacgcgacgacggccccgctcgatcttgatctcatcgtcaccggagcgcaggacgatggtatcggcgaggcgctgcaccaccagatagccgccgcggcggatctggttgaccacgacaaagtcgctgccgtccttcaccagcgcgaccggccagctctgcaacgcggcggcaggcagtcgtagccagagcgccttgccatcgtcgaacgcggtctccggcttgaagctggcggtgccggaaatggaatactcgaagttcagctggtccggcgacaccccgacggcgtcagggttgcgcgcttcggccccggctgacctggcatcctccccttgctcgtcgcgcgcatcgttgcgcgccttgaccttggccgagatggaggtcggaatgcggaagcgcactttctggtaaaagatgccgcccagcggcgaggacaccagcgtgaactcgtagctacgcttattcgtgttcaccgacaaggtattgacgagacccgccgcctgcggcttcacatagagatggttggcgccatccgtgtcgtaatcccagcgcacgttctcgccccatgccgggtcgccaacgatctgctcatcgtccgggaactcgatcgttgtgactttcagaggcgcgctcagcacgcggaagatctggtcgcggctgtacgtgaatacgacgaggcgtgaatcacccggcaacgcgatcggatcgacaccgccgttgaacgggttgcccgggttcatggcatcgctcagatcgccgatgccaaggccggcgacgcctgcgccgaggcgtcgcccattcttttccgccgcgttgccatcggggatggagagcaacagtgccaggccaagggcgatggccagcgggagaagtcgggagggggtgcgcgcttccatgggcatttgcacggctcaggccgcagatttctggatggagaagaagatggggaagacaccaaaggggttcgtcccgagcatggcttccttgtccgccggcttgacctgatagcggaacgtgatcgcgtaccgctgcttgcgcggcttgtacccatcctcggtggtcgtggtcacgaattccacaaccacggtgctatcgggcaggctggcaatattggtgaacttcggttcccgggtgagcgtcggcgccgacatcacctgccggaacggctcgtcttcatccacccatgccttgaactgctccttggccgatcccagcatctgctctcgcaccgaccgcagattccccgccatgcgcgacgactcgatctgaggcgtcagaatgggctcgatcgtgaaccaccgctgcacgaggtccttgagcgcaaccttcacctgtcgttcatccggatggaatgcgtccagttcacgagtgatcggcttcccggtcgcatccgccgaaacgccaacgaccttcaccaccgacggcggcggctcgcgggtcagaatcgccgcgagtgcgacgcacgcggcgccgaccgttgcgagcttccagtgattgcggtccacggtgatgcgcgtggtccgatcgaaaatgacttgctctggacgctcttcgccatacatacctggcgcaacggtcaggggcttggctttgtcggtggatctgcgtaggaatcgcatgatgcggcgggcttttgggatgccgctaattgaatcagcgaaatggcatgcatctgccctcgaaagctgtgccaatttgctgagctttccaattttcctctcgcttcacctcaatttgatacctccacagccgtcgggatggctcgcccagcgccagccgctatgccgccacccgattccccgcggcgaagggcgccagcgaggtgtctaccttcgaaagctcaggatttgaccgcgtcattcgctatcctgagaaggaacatgttcctcttgctacgacttgagcggaccggcgccgcacgacttcgtcaaaagctcttgaaaatcgcctagctttcagtcgactacaggaccgtttgcccgccaacaatagcgggcatggaatcagcgtccaccaaccaccctcttctgcagctcacgcagcttgccgacagcgccgtgtcgatgttcttcgaatcgctggcgccgttgcacgatgtcattcatgcggatgacgtggcggaggtcatgatcaatcgccacaacagcatctgggtcgagcgacgcggcatcatgacccgactcgagatcgagatcgatccgttcaagatcgagggggcgatccgttccttggcgtcgtcggtagaaaagtccgcggtgcgcggcacggcccagggcatcatcaacgccggtcaaaagggcctgcgcatcgccgccgtgatgcagccaacgtcgatcgacggccacgctctgagcatccggcggcatcgcgagaagaacatgcgcctgtcggactatgtgaaggccggcgcgttctcatcccggcatgcgcgcacggaaaccgagacgcccatcttctgcggccctgtcgaggacgacgcactcgcccaggcgctcggcgagctagtccgcctgcgcaagaacatcctggtggcaggcggtacgtcttcaggcaagaccacgctactcaatgccatggtcggcgagattccaccggaggagcgggtcatcaccatcgaggacacgacggagctcaagcccagcgtgccgaacgtcgtgcggctcctttccaacgccgacaagggcgtgaccacgcagcatctcgtcgcgctctctctgcgcttccggccagaccggattctcgtgggcgaagtccggggcggcgaagcgtacgacatgctccaggcctttaacaccggccacgacggcggcatgggatcgctgcatgcgcccagtccccgcatggccttgtcccgtctcgaaagcatggcgctgctcggcatcccgcccggttccggctggaaagtcgaagacatgcgtcgcctcattgccgactgcattcactacgttgtgcacatgaagcgttcgggagacatgcgcgtgctctccgagatcattgagatcaagggctttcgcaataacgactacgaataccaacgcgttttctaaacctcaggagtcttttcgcatgacctccccgttctcacagcgcgcccgcgcaacagctcgcaagtacgccccgtccgccttgctgctcgtcggcatgatggcagtcgccacctccgccgtcgccgcggacgattcgttcctcggcaatcttggcaacttcatctgcggcatcgccaccttcatcaacacgaagtatctgttcgtcatcggcctgatcgtcattgtgctgggcgcctatgcctatgccaatgccgaatcgagcctgtccaagttcatctcgggggcttgcgttggcgtcggcctggccgcagcggcgccgtcgatcctgaagacgctgaacatcgtcgccgcctgcaccggcttctaagagatgagaaagcaccatgtgagcatcggcctgtcgatgcctcgcctgatcgcaggcgcggtacgtggcctcgccatcgccaacggcaccatcgtcgcgctgctgatctatgtgacctaccgcagcggctgggagatcccggtgtcgatcttcgtcatcggcctttgcacccatgcgttgctggcgtggctgacgagccgagatccgtggtggaaccagatcctcaacgtctacaacatgtacggcgacctgtacgagtcggtgccctggcacggcaagtccgacgcggtgttccgccgcccgtacggctttgacagtgacttgccatgctgaaactcaaacgccggccgctggcagagatcgtgccgtggctcacttccctcaccccggagctgatcctgaacaaggacggctcccttcttgcgacctacgagtttcgcggcgtcgatgcggacagcgccgacgccagtgacatcacatcggcccgagaccagctcgaccaggcttgccgatccttcgacaaccggatcacagcctggtggcgcctgtcccatcgccgaaccaccggcttcattgacggcgaattcagtaacgctgcggacgcgcgcctcaacgcgctcaaccgcacgcacatgactacgggccgatacttccgcaacacgcacgcgctcagcatcgcctatacacccgaatcgggcatcgccaagttctttgaaaagatcggttaccacatgacggtgggcggacgatcggtctacggcgccattgttgaagccgccaaggatactgtgctctctcgcagtgcgttcgccttcgatatggaaaaaatgcgcgccgatacccgccgtttcgaggccatgcttgacgcgtttgccggcggcatcccgcgcattaagccgacccggctcacgatgcaggacagctatgcggcgctccaccaggttgccaaccccagcgtgccgccgcgtcgcatccgctatccggtcaccttgctcgacacgcacctgactgaatccgaggtcacagtgggcgccgagcgactgttgttcgaatctgcccacggcaagcgctatgcggcagtggtcgcggtgaaggaatggatgagctttcaggaagcggcactagacagtctcctgcaggtcgatgccgaactggacatctgcatcatgtaccgcttcctcgacactgcacgcgcgaccgcctacatcgagaaggttcgccgcttctacaagatggccgcggtgaacctgcgctccatgatgaagcagtacgtctcgaaggaggaaagcgagaacgacgaaggccgtgaagagctcgccaaggaagcgggtcacgccctcaaacggctcaccgccgagggcgtgcagcacggctttgccaacatttcggtgattatctacgcggattcggaaagtgaatgcgaggacgccgtcagcgaggtggtcggcgcattgaccaacgccggcttcggggcgatccgcgagaaggccaatctgatgcctgcctggaacagcaccctgcccggtcgctgggacaagcaacggcgactgcagttcgtcgaaacgcctgccgtgtccgatatcgcacccgtccgctccgttctggaaggcccaaccttcaacgcatggctgagcgagaagaccggcgccgaggttcccccgctcacctgcctgccgacccgccaccggactatccagcgcgtcgacatgcatcagcggggcggcaatggtcatttgttcgtgatcggcccgattggtgccggcaaatccgtattcctcaactttctggtgtcgcagggcgacaggcacaaggcgcgtcggattcgcttcgacaaggatagatctacccgcattcccacgctgctcagtggcggcacgttcatcgacgtgacgggcaagttccagaccggcacgccggtcaatcccttgtcgctgctggccgatcccgcgaacttcacctacgtcacggaatggctgacgctcgccctcgaagacgatgacttcacgctgtcgccgcagcaagtccaggacctcttcgaggccgtgaagctggtcgctggatacccccgcgaacgctggaccctcagttcgctctcgacgatgctgcatgctgatcttcgcgcgcggcttcagatctggctcaagggtggtcaatacggtcacttcttcgatcacgccgaagacgcattcgccgtcagtgacaacctttgcatcgagatgggtgagctgttccagaagtatgaacgcgcagcggtcctgttcaccgactatgccttccatcgcatcagccagtcgatggacggtatccgctacacgatcatcgaggtggaggaatgcggcttcttcttccagaacgaacgcttctatcggcgctacgaggattggattaccaccattcggaagctcaacggcgccatctggtccgcgacgcagtctcttcgccagattgcacgcgtcgcgaacttcgaaatcctcaaggaaaacatcgccaactgggtctacctgcctaacggccaggccaagaccagtccggagctctacaaggacaagtttggcctgaccgatgatcaggttcagctgatctctgaggcggtgccaaaccgcgactacctcctgatcacgaacacccagacccggatgctgcagacggcattttccgacgagatggtagccatgctgcgctcggacggtgtcgcacagtccatctgcgacaagcaccatgcatcgggcggacccgactggcaagaccgctacgtgcgcgaaatgctcgcgcgcgcagcataactttggagaagcaacgtgaagaagtggatcgccaacatcgccatcgccacctcggtattcggggcttcttcggcccatgccgcgctgcccgtcaccgactgggtgggactcattcagaccaccatgacagcaatgcaatcgctgaaaacggaggtttacgagaataccaatatcgcctaccagtacaagatgatggccaaccagcttctgcagtccacgggcctggacgccgcctccctgacggagcagctggacgcgatcaaggatgacatcggcaagtacgaggtttatggcactacgcttaaggacttgtatggcactgtctccgacaacgccgactatttgaagaagatccagagcatggtcgtcgcctcgggcaagaccaaggagcaatggttccaggaccagcgccagctgctgagcaacggcgacaagactgccaagaacctgtttagtctgggcgagcaaatcttcaagaacactcaatctgtcgcgcagcgccgccagaagattcaggcacaggtcaagctctcgccgacggctcaggcggcggcgcaatccaccaatcagatgctggacgttcttgccagccagaactcggatttgctgcagctcatgagcgtgcgggcccaagcggacgcggataaggaccaacagagcgtcgccagggaaacgcaaagcgctgaggctatgcgcgcgatcacgactgcgcaggatgaggagctccggcagttgcgtgcccgggtgttctctcgcaagctgcaagccgactgagcgggtgccaggaagccatgctattgcgtctattgattctactggtcactgctgcgctattgcacgcaaacgtggctttcgctcagaccgagattccccccttgatgattgggtcgcaggcggaagaatccaccaagaccccgccgtcattctccggacagaaagggacgatcgccgaatctctcaaaagttgggtcggccagttcgagtcgtttcgcagcggcctgatcgcaagcgctacaccgctgagtcagaccatccgatcggagaccgacaaggtggcttatggcttagcactcatcacgctgactctggccggcatccgattcgctgcaacgaacgatccgaccacggcgtggacggacatttttgaggcgttcatgctcttggggatcttcgcagggatctatttggggtacgacaagttcgcaccgggaatttttgactggttcaaaatgctcggcgacaagatcgccggtactcgctccagcaatccggccttgacgctcatctcggtaggcaccggcttcctcgacacctacaacaaggctatggacgcggcaagcggcctctccgtccttagcgtagccctttccgggatcgtcctcatcattacatttgtggtctgtgcggttgcagcgctgctctacagcttcttcatcgctttaggggaggttcaggccgccgtcggcatcgtcgtgggccctctcgctgtcgcgctcgcattctcggattattcgcgccgcttcttcgtctcttggctcgatttcatgattagcgcctcgatgtacacggtcgttgcctccgtcatggcgcgactcgtctccagcgcattcacttccaccatggtcgatcagactgacatcggcacccagtcccttgcgggcgctgcctatgcgctcggcgtcgcgattttcatgctgcttgtcgcactggagatccccaagatggcgggcgcaatcttcggctccggaggcgggctgagcgggggtgcggccgggcgtctgggcatgaaagccgctagcggaatcggcgggttcctggccaagaagggcaagtgatgacggaccatcaccacctgactccagcggctttgctggcatcccacgacagccgcctggcgttggtccgacagtatgccaacgaatcggatgacggagacttccgcacgaagtggctgagcgtcctggatcgatgtgccgcctggttctccagcatgccgcttcggccgacagagcacgccgagcctggtggggcattccgcgcgacggtcgaagccgcgtacttcgccatgcgactgtccggcgcccagaagtttgccgcagaccagacctcggaacgccggcgcaagctcgagcctcagtacctgtatgcgctgttcctcgccgcgtgctgttcgcggctggacgagccctgccgccacttccagtttcaccggatgcgcgatggagcggaatgggttcctgccgcacacggggcattcggcgcgtggcttggcgatgacacctaccgggtcacccgccgtgaggcacctcttccgagcgagcggatgcgcacggcactactcgcgcgggaaattctgggtacggagcggttaggcgcatttgacagccaggtactgaccgatttgttcggcgccatcaacccagatccacggccagccggcctggaaacgctgctgcacaaggtggtgcgtcaggccatcgaaaccgtcacccagttcgagttgaaggcccgtcgggcggcatttgccccggacacaacgcctgccccgtcagcacaagcgctggctgttgatgccatcaccggcgcgtcgacgccgcccgcgcaggcgagaacggagacggcgcccgtacccgagacggggacggcgacgcccgtggaagtggagcaaccggagactacgaccgaggcggatccaagctccccagccggactccatcaggccggcagcgatgcgagcgcgcagcaccgtgcgtcgcctaacgccgtacagctcgacggtgcccgatccttacgcaaagaagcaccggccgaggatccattcaaggcgattgcaggcacctcgaacctcatgcgcgaattcttcaaggcgctctcccaggacgcggccgccggcaagacgaaggtaacccgggttgagggaaaggttgccatcagtaagcgctcgctcggcaactatggcattgcctccgagacgctcatcgaaaatctgcgcaagttcaagcatctctacaagatcgtggggcaagacatcctgctggtcaacgaagttggcgacctgatcctgcctgcctcccaagcccctgaagcatgaaccagtacattaaccacttccgtcccatctacgagttccgcgcggtcgtcggttgggcattggctgtcctgctgcttctggtgagcggcatgcccaacagtggctactttgcgctgggtggcatggcattcctgctctttcgctccagccaggtgtggcgtgcgctcaggttccgtctttccatctccacgaagtggctaaccctcgtccggatcgatgatctcctgacacagagccgcaagttgcgctcggatgacaaggacgacgatgccatgtatttgggtaccggctacgaatggacccagaagcattgtcagattgcccacgacatcctgcgtatgccgtcgagcgacatcccgggcctgccaaagtggctgccgaaggacaccgtcaaggccatcgagaagacgttcgccccggagaacagcattgccgaccgatcgccccagggcaaatcctggatcggtggcatggaatccctgcgcattcccgtcccctttcactacaaggcaatgggcggccacacctcgatcagcggcacgactggctccgggaagacccgaacgttcgaactcatctcgacacaggtcattcacaacccgaatgacattttgatcgcgattgatcccaagaatgatcccgactgggtcgccaggtgcaagcgcgaatgcgagcggaccggccgcaagttcctgtactggaaacaggccgcaccatcgcagtctatccggttgaatccgctggaaaactggtctcagccctcggagatcccaacgcgtatcgcccaactgatggaggaaggccctttccgccagttcgccttcctgttcatcgaccgcgccgtgaaaggcgagctctatgtcggcgacaagccgaacctgcgatcgatcctgcagtacgcacagaacggcatcaacaatcttcttgagcgtgggctggagcgcttcttccccgaagccgggaagccggattgggaagaggaagccgcgggatatatgcagaaggttgcacagaaggcgggtggcacccggctggacgccatggtcagcctgtacatcgaccgattctcgaagctcggtaacgggcatgaagcgatcgacggcctcatctctacctatcaacacgaccgcgatcactacggccggatcatcgcatccgccctgcccctgctgcagatgctggcgaccggcgagaccggcttgatgcttgcgccgaaggcggacgattttgaggatgaccgcgagatctgggatatcgacaaggtcatcaagcagaaggccgtgctgtatgttggggcggactccctatcgaattcgatggtggcccaggctgtcatgtcgatgctgcttgcggacatcgcttctgtcgcgggtgcgatctacaacttctacgccaaaccacctgagatcgtcctggtggtcgacgaagcggccgaggccatcaacgagcaattgcttcagctgttgaacaagggccgcggcgccggcttcaaggccttcgttgcctaccagacccgctccgacttcacggccaagctgggaaacgtggccaaaatgcagcaggttttgggcaatttgaacaaccagatcgtcttacgattggaagacatcgacacggcgcaatggttctccgaaaaggccggtaccaccgctattcgcaacctggtcgtgtcgagcagcaccagcaccggaaccgaggcccacatcggcgagttcagcgggtcggtgtcccgttcggcccagcttgagaaggtacccctgattccgcacgaccttgtcatgcaactgccgaacctgcagtacttcttgcgaatctctgggggcgctgtctaccagggccgaattcccatcatcaaagactaaacaccaatgcgcagcagcctgttccgacaaatcgtcaaggattacaagctctcggcgaagctttcgccggtgttttccctatcgccggacctcgatgacatttgcacgcgagtggtcgactacatcggtgtcaacttccgcgtccgagaggaacctctggtcaaggaaatgctggctgatggcatcgccgcctggcgtgccgcgcgcaagcaaggcgatccgaacgtcgccttcatgaaaggcctgttctcccgcgcacatgaactctatggcaagcggtacgcggcattcaaaggcgagaagtacaacgtctggtacccgtttcacgagtccattccggcgttcgagctgcgccagcccgaaggctatgtctgccgggtcgtcgacgaaccagcgccaggcgcaatcacacaacgctgcgctgcgtttcagctcgccgcccgcgtgctgacgggctacacctttacccgctacttcgagaactacgatgtcgctggcaactttgcacaatgacgcacgccggcttgcgatccgcctcaagcaggtgccggcgcgcatggctgccagactttgcggcgtagacccggcgctcgccctgcacatgcacgagtggttgacggctccgcctccgggcgcgccggcaatgccgcaagccttcaccacagaagcggcggcagcgtgctttgcgctcatcaagatctccgtggtgaagccggctgtcttctggggcgcgttggtcgcctttctgagcctgccggtattgctcgccctgcgatggagttgacatggcaaatagccgattcgcgtcgcacgtccgtctgtggctgatcttttcgccgctgatgatctgcacgctcgctccgttcatccaggacgaaagcgccttcgaaatcagtgaagcggaacaggcctcggttgagcgcgtgctcggccaggaaaaggccgacgtcgccgtgacactggccaatgcccgctttcgccaatggttcatcgagagcggcgttgtcaagtcgtcgttctccggctccgacgcccagaccggatttgccgataacggcgcgtctgacttcggtagaagttggatgcagcacttctggctaacgatctaccgcgcactgtatcgtgccgcggtcggccattattggctcgttggcgcaatcgtgctgttccttgccctgttcaatgatggaaccgtgtcgcgcaagatccgcgctgcgggcgccggctttgccaatccggtgtccttccatgtggcggcacacggcttgatgctctgctttggcttcggcgcgtccgccctgctcttaccccttcccatgctggcgacctggtggaccttcggggtctgcctggtcggcctgctctgctggcgccttgcagcgtcattccacgtcggcaagtagccggctccgcaacgactaacaaggccgggtgtccggcctcctataggagaaatcatgaccacgaccgatctgacccctgcagatgagccgctccaggaagttggtccgaccgacgatactgttgcactgctcgctgaaccgcctaccacgcttggctcgattgatagctccggcgatgtcgagacagagctcgcggagatggagcagtcggccgacgtattgcgcaacgagggtctgatctcgacagcggaccatgaggagcgcaaggccaaagtggaacgtactcgcaagttgtttcgtgatctgccctccgaggaccgccaggcgatcgttcgccgtcgtcgcgaactcggtctgctgatcctcaatcgcgagcttgccggcgcggcagtcgttcccgtggcgctgaagctcaatcacacgcgcctgcgcccgctcttcgagcagtggtggccatacatgaaccgcatgtcgctgaacctgcagcgcttcggggcggctactttctcgcgcaccgaactgtcgacgctcgagaactacctcgaacgcgagctctcgaagatcgaggactatgtggacgaacagctgcgtgtggcgaaagcctaccgcgagcaacgggaacaggagatgcgagcgagaggcgagatcgtgttcgtcccgacgatccagcgcccgtcccttgcgctcgaggtccaggcctactcgcgcttttccgtgcgtgccctgcaggttctgatcaagttcgatcaaaccatggaccagttcgactttatggtctggaacggcatccgtgaccagagcgacgtcaacgatgaagtcacgcgcttcctacgcaagttccagccgctgggcctgcgcagctacaccactcacctgaggttgatgacgacggtgcgctgtatttgaccacaggaattgatgtgacatggtgtcacttggtgtgagctggtgagaccacgtgggacatgatctcacttccgaacgaatcaataggcgtcgacatctgccccgaggtaccacttcggggcacttgctgttttgaaccggcaccaagtgccacttactgccacactgcgatccgccatgtcgctcgaaaaggtattggaaggactgaaccccgcccagcgcgaggtggtcgacctccgtcagcactgcgtcgccgtggccgtgccaggcgccggaaagacagcgacgattgcggccaaggcagcagtgctgctcgccaacccagacgtgacggtgggcgcggtaacgttcagcaaggacgccgcggtcgaattgcgtgaccggatcctggcgctagccggtgccgatgccaggaagcgactgctcgcgggcacctttcattcgctggcctataagcagctcgggaagggaaccggcaagctcaccgatatcgtccacgacggcgttcgattcgctatcgtcgggcagatcctgcaggaagggggatttgatgggaaggtcgaggacgcgatcgccgcgattgagcgcgccaagatgcaactgtccgacccgccttcaggaaccgtggaggctcagttgtatgaagcctaccagagtgctctggcccgaaacggcaagatcgactttcaggacatgctgcggttggctgtagctggaatgcaaagcggaacaattgcgccctaccgtatgacgtacctgcttgtcgatgagtaccaggattgcgacagcttgcaatcacgctggacggcgctgcacgcggcggccggttcgatagtgacggtggtcggggacgatgatcagtcgatctacggatttcgaagtgcgctcggatttcgaggcatggaggcattcatcaaagagttcgacgcgcggtcagtcatcctcgggaagaactaccgctcacatgccgagatcctggacgtcgcggatcgggtcattcgaaacaacgaggaccgtatcctgaaggagctggtagcccatcgcgggcctggcggcgctatcgagttcaagcgtttggaggacgagtacaaggaggcggtttcggccgttgaggcgctgacaccggttttgcgggctggcaaaacggcggccgtgctggcgcggacgaaccgcattctcgatccattggaggccgtctgccgctcgcacggtgtcaagtattacagggcagccggccgctctattctcgatcgcccggaggcagcgttgatgggggacctactggaactgattcagaagtccaaggactctggcaccgatgccctgctaggtttcgccggaattggctcgcatgaactgcagctgctacacacgcagactgcggcgaagccggagggatcgattccgcgaaaaaagaacctggtgcaggccgggatcgcagaagcaacagtcgacaagtatcgcgacttcctaaagaagctggcggaatggcaagcgctctttgagcgccagttcttttccctcgttctcgatggcgtgcgcgaatggatgctcaagtttgttgcggacgacccgggcaagcgcgctatcaataccgcgtttgacgtcctgacgcggctgaacggtccattttcggaacgactcttgtttctgcgccaaaagaataacgaaccggccgacgacgccttggtgctgacgaccatgcatgcctccaagggacgcgaatggtcggctgttgttgtgatccgggccgaggaaaccatcgttccggacgaagccagtccggagagtgaggagcgtcgactgttctacgttgccctcacgcgcgcgcgcgactggctgcagatttctacggcaaagaagaaccccacgtcccggttcgttattgaagccgggctaacttgatttgttaagcagccggtcattcgtggtgtctgctggttgcgagctccctgccatcgtgtgtgccacagccgtccggcacgtcatttttgtgcgtagcggtggcactcggatttcaaggaggggttgttgagcccgtaggcatcctcataagcgaaaaaagcctggagttgcagctccaaggcttttaatcggcattgacaacaggcgtagcaggcttcgaaaccctcttgactcgtccaacaacaagacagtccgagtttatgaagcccacccttcgttgtcaatgctcccccacaagtttgcgcattgaccgaagaagatgagctatcgcttcgacgggcttcctattgccccaagaacaacaacgtgtggcggtgcgccgcactctccggcccctatcgaaagcgaagcttcgaaacgcaaggcagccaggtgcgatgcccgccggctgcccgagcgggttctcagagcgatcgcgttggtctacgagtccgatgggcttcgggctttgcacatcaccaatcgccaagtcttggcaacgctcatccgcttcgctctgaatcagaaggatcctacctcgctcgccttcataaagaaggcaacgatcgcgcagcacctctcgattagcgaggccactgtctatcgggcgcttggcacacttgaagatgccgggcttattgagcgtgaaaggcagcaacgcacgagggcgcagctcgaggtcgttgggcggatcgggttcaccgcaaagttgctacagtgtatcgggctcgccggcagggagcttgggtacccagaacctcaaacggactccgacgagtcgcggtcccgctccgcatgtctcgcaccagtgagtggcgtaaacaaccccaagcagtcttctacgaagaaacattcgggcccgagagagtttgtgcaaattcacgatcgggctgtgcccattgatctagcgcctctcgtgcgcgaccaagagctgacgacgtccgccctcttccttctgatgcggctcgcgagagaggccggccacagactgtcggacgttgtctcggcggcgggtcatgttcttgggccgctgcggggacgagagctgttcgcctacctcaagtcgctcctcggaaagcccatagactatagctatgtcgttcaaactcggaaggcccaagaagacgagaggcgcgcaaccgccgcgcaggcggcgcaagaccggctggaggttgcccaactcgttgagcgataccgtgggcaacgggtgtccgcacctgacggtcggatctacgaggtcgactcggcctcgattgtgatcaccgaggccaacggtcggcggagttcattagggcacgaccaggcgcgcgcctggctgatcgagatggacagagcagcgactgggctctcgcgtgccttggcccagccgtcgtcagcgacacggtcatcgtcggccatggcacaggccgctattgagcaacttcgcagcatcctcggtggcagacctgcacccaacatggtaggtggctgagctcggaggtctagttacacgctccaacgtgcttgcaggccttgaaccacccgcttgagagcgcttcaactcgcttgggggcgctatggcgcgctcgaaggcgctagaccgaaacagctggggcggcaacgcgccaagtcaaagtccgtgacccgcgaaacccccgctacgcgtcgacagccgcttagcgggggtgggagagttcatcccacggtgtcctctcggaggcggattttgagtccgctgcctgcaaccagcacggcaagacctcgggcattctcgggagcagtccgcaatcagacttgtacactggcttcgaatggttagatcgacgcagcggggctttgctttagctggcgttgagtttgtggtgaagtaacgctggtgtgctcagatcagacttgctgaggccgctgcacctactcgcttggcggccttcgccgccttgtgcacgcgactggccacgaagcctccaaacgtgcttcgaacattagggtcattgatgtactcatgcacgttcaggatcgccacgttaagtcttcgcgcaagaagcttggcagcctgagactgacaaaattcggagatcatgtccgattgctgctcagtggacagcttgttgtaggcttcccaaccgaaatcagcttctcgttggtcgcgctcggcgccagcagccttcacgcgggcctcgcgctcagccatctcctggtcagcagccttacgagttgactctacaatggccgactgatgatgaatctgcttgtcgagttcaccaagcaagtagccctcgcgaagggccttcatgaaataaccacctgctcgcaccttcaccttgccaactttcacgttgtgccgggtgtactccatggcctggtggattcgctcgtcgttgtacaggtcgcggttggtaataatctcgttgaattcggactggttgagggcgaactctttgcgcaacgtctcatagacgttgcgaagcacgatgaacgcggtcttttgctcgttgggctgctcggtaacgttcaatcggaatcggacttggccgattttttttgaaccgggcacattaagtgtaagcatctcaatgtggagtccggtcacttcgcgaatttcggagatggctacctcaaggactttacttcggaagtgcttgaagagatcgtaggttttcttctcgcactctagccaagctcgtagggcttgaacttcgaaccaaggggtaatgccctcaaccatgaattgttgtagtcggtcgtacaggaccttagagtgcaccgacttgaatacatagcgcaggctaagaaagtgggaagattttgggttcttgatggcgcgctgtagccgttcaggaagctcgaagatgaactcccctttttcgatgaatgctgagcccattaggggcactgcaccccagcgatctttggaagggtcttcgacgtcgatctcgttaagctcgatagccgctttctgggcttcgcgaacgagcttgcttaggtggcgtctgttgttgctcgttgtggccagaagccacttgaacaagccgacatcgacccggtattcgcgccggacttcttggtcttcagctacaagaaagtaagcaacatcgataaggcgacggcctgccagactgaggtcgatgattttgacgaaggcattgctgcgacggaagcccaaatccttgggtgcttccgtgacgctctggcctcgaggagcgaagtcctcgaacaatgccaaggctaattgttgcgatgcgctttccataccacttccctccttcgggcaggaggttgcaggggaaaggtcgaaaagtcaaaacatttcttgtgactttgccttccctgtcgtctggtcggcgtcccagcgatggtgtggccgaatttggtcaacgataggaatttgcggtcgcggttcgggacaattctggtgaccgttcttggagtcggatgcttggttcctgcggtgggggttgttcgacgtgcccggctttaagatctgtctataggagcgcggggtgggttagtttgttgtttttataaacagaacaccacttactagaggcagcaggcttgtcaataaaatcaatgacttagtttggaaaggtcacttttgtggttccaaaggtcgccgattttgtcgggcaaggttactagatgtggtcgaaaggacaccggatttggccgggtctcccagatcgatggactgtcggctctgacaaggtcaccaaaattgtcctcaaggtcacaagatttgttcgattccggtcctaagcctagccccacaaggatctgcgagcggtttggccgacgcacggtcacaggaattgtatttctgcggggaagggcttggtacgcagccacagatggagcaaggtcaccaagattgtccgtaattgcggcaacaacaggctcgctgagatcgctggattgaccctacacgggcaacaaggtcatcagaattgtctgtccggttgctggagtgggagccaaggtcacaagatttgtacgatctgggcctctaaccatctggcaaggtcaccagaattgtgcgagctacccgcgggttactggcggaaggcacattgcgcagcagtcacctatggagttgtcaagaagttggtggcctttttttgccagttgccggtgatgagtattccgcagcagccaaagtcgccggtcttcatccgttgttttaagggatagcaacgcccgtaggaacgtggtgaccttttccgcatagcgatgcgtacaattttggtgactttgcccgggtaaggtcgctagtagaagaactccgctgcgggcccgacgctaatctgcagaaccacaaaacagtgaattcgtacaattgatggtgactttgcctattacccaaggattcaccggtcgtggtgcgccgttcggtgtcttccgcgtgcggtctttatggaggcgacggcttaagtcaatcttttcccccgcgtgagttacgctctgggccggactggcctcatcagatacggcgaatcgcgcacatagagcccccctgggcgtcactttttcgccaaaagtgcgtacaaatacgtgaagtttccccgttggtcgcgtattctacgtttcatcctgaatttcacatggaacgttgaatatggtggtgaagagcgaattaaccgagattgaccggactgtcacgattggttcaatgagtgacttttcgaagaagcttcaaaaacttactgaggaacttcgcgaacatatcctggcacctcgccctcggaaaagtccgcccacgttcacctccacccaggttgccgaaatgtgcggtatcgaccgtgcgcggcttcattatctggcaacgaaagacgggagcacacttccggccggtgagcttcatgggcgcgtacgccaatttacgcttggtgagactcggaagtgggttcaacaagcttcacaggtgaagccgtccccgctactaagaaagggcgaagcggatggtcgcgttctgatttctgccaacttcaagggtggtagttgcaagacgacttcgagtatgtgcctggcgcagggattaagtttgcgcggccgcaaggtgctgctggttgacttggaccctcaggcatcgctgaccgaattgtgcggcctgtatgccgagaagatgattgtcgaggaaagcaccgttctgccgtacatctacagccctgaagactttacgcttgagagcgtcattcaggagacgtattgggatggggttgatgtcatccctgcgcatccatctttgttctccgccgagtttcatatcccggcgatggcaagcaagtcggcgaattatcgcttctggacgctgttacgtaagggcttggagccacttcgaaaaaaatacgactatatcgtgttggattcggcaccttcgctatcctacctgactatcaacggcctgatggctgcggacgccatggtgatgcctttggtgccggaaagtctcgacttcattagctcggtatcgttctggagtctgttctccgatatggcggacagcttcaagaacatcgaaggaaacaaaacctacgactttgtgagcattctgctttcgaaggttgactatggcgtagcgtcttcggctccgatagttcgctcctgggtacaacgagcctatggcgattggatgagcccaattgaagtgccggcgagctccgtgatgagtaacggggctctcgcacttgcgacggtcttcgacattagtaagttcgagggcagcaacaagacattccagcgtgtgcgcattccgttcgacgaatattgccgttgggtggatgagttttacgccggaaagtgggaggacgcttaaatgaatatgcgcaagcgcatgctggagcaaaccgcaaatttgactcctgctaatgaaatcaaagtggaaatcgccccccaagttgcagaccggccgaaaactgcaccagggatgatggcggccttgagtgcggcacagcttcggattcaagaattggagtcccaaggggctgcaagcaccgttccggtcgagaagattcggccgaatccctggcagccgcggataaagtttgacgagagcagtctcactgagctcgcggagagcattaaggaactgggcctaatgcagcccattctcgttcgacgagtcacgccggacaacggagaatcctatttcgagctgattgccggtgagcgccgttggcgcgctcaccaggtgctgggtctacaagaaatcaaggcgctcatcacggatgcgtcagatgcagatatggccgtcctcgctttggccgagaatgtcagccgtgaagacctcaccgactacgaaattggcaaggcgatgcgccgtgccgagaaggaatttccagacaggaagcggatggctgaatccatggggatgagccggagcacgctctatcgatattttgccttcgacaatctacccgaattcatgcgtgtagatctggagaagaacccttcgcttttcagcggtaccgcggcaagtgacacctacgccgtgctcaagaagcatggcgagccagctgttgcagcggctcgcgaggtctggaagcaacttgtagatggtagccttgagcagtcgaaggtcgccaagctgctggaggcttcgctacttcgtcgtgaagcgacgcctgtaacttcccagcgtgacattcataaagtctatgccggcaagactcaggccggcagtattaccaaggactccgtgagctttaccgtaaagcttaaaagtgctgtcctgactgccgctcaagaggagcggatacggacggttatcaatgaacttttcgacggaggaccgcaacgttaacagttgtcgtctccagactattcgaacccctcactgaggggtttttttgtgttctgagtcggagtggccttgtcagaagcggagtttgtcggtgcgaacggtgcaatgtggtcccatcgacagcccgagcaacgtgttccgagtcggaacacgacgtcatcaggcacacgatcccaaacgattcgaacggctgcaccgatgcgctcatcgacgcctccgggtgtactggaagccggcgcgccgcatagtcgaagcctacttcgagttgatgttgaacccgcacatccattgcgtgcctcggtgcaagagcgacttcaacacgcgatgcggattgatctgctcgcccatagcctgatccggtcgagcttcgagcctcaccccacgatgctcacgcagcatctggataccattggagcctcggagcacacgcccgccaactagacgccatcgtgggacaagcgttggcgccgatccgattgcacgctcgcctgctgacctacctctctgaggtgagcaacatgaccgctccgctcctgttggttgagatcgtctcggaacggcgcgttaacaaaagcactatcgcctgcccaaacgactcacggctttgctgccaacaggagaccccccagatgaataacgcttccgagtaagtcactggaaggcttcgtgttccgactcggaacaccgaagctcaaaggtctgaagcagcatcacccgactaaggcgggtcgtgcgggtgtccgtgttctgacttggaacgcagctgagtttgtcccggcgatacctcgggcgagcgcattatgggcgtcaatggaggtcgcttacggggacccttgtagggcaggcactgcaaacggacagcagcaatagctttgcggcgcaagatcgcgctgttatggagcgctgacggccgaggacacgtcgcctgaaagagtgcgacatgataaaggcgggcgccgagcgccggctctcatagggggaccgagtttggcatccgtggccacacctctcaatgagttgccttacgtcacccagagcttgcatgccccggattcgtctcgtctcaacttgcgacataccctcgcgggatcccgcgacacgatggcgcaaggaccgacagcaaggtcacaaagtttgtacgaatcctagttgcaaggcctccgtaagccctgtgcgcggacttgtttagcgccggactctgccgctaacggacaatcgacggtgaccttgcctgttggggagcatcggaacagaacaatattggtgaccttgcgagagcctgcctgccgcgctacgcattccgctgcctccacagaaggattccggatcgggggcatcctggaaaggtcaacgcgctcccgtactcgccggctgagtgccattgcccgtctgttggccagaagggcagtgagggggcccggcgccgcaaagggcttgccggcgaacgcacaagccacttcttccagtgcctagtgggtggcgtcgtgctagcgttgcggtgacccaagggcgggccgtacgtcggtcatggcacgccagctgcagcagatgcgtggcatgcgcatgctgcagtcagtgcgtcgacgcggcgcgctgcctgggccacctgctcgccttggccctcgcgctccaggcggtcggccgcctcggcgaaagccgcgcgcgcgatcgcgtagacacccagtcctggaaagccgctaactttggatgctgtacagcttcgccatggcggcaataccgcgcctgcgttccgcgcggacatacagcgaggtcgtttgcagcgaggcgtggcccaacagcctttggaggacatcggtggggatatcgttggccaccgcgtgcgtggcgaaggtgtgccgcagcgcatggggcgcggccttgcgcagcaagtggcgctcggcctcgtcaatcggcagggtactgtcttccgcgatgcgaagcagcgtggttgtcagcacccggtaaagcccgtctggcgaaaatccctctccgctcaggaccggcaagccctcccgcagcgtcaggtgcttgctgcgggcggtgcgcgtcgagggcagcgacaccggcgacagcaacgccagatcctggtgcacgtcttcaaaatcgtggccccgatcggcccagtgcgcccgcagcgcctcgatcacgcgtggcggcaggaacaccgtgcgccatttgccgcgcttgccgagcagcgccaactcccacaggccatcggggatgccggcctgctcggggacgggcttcaggtgactgcggcgcgcgcgggcgacctcctcccggcgcgccccactgcagcccatcagcagcaccgctgcgcgcgctaggcgacattgcgcacccggtgtgtcggcgtcctttgcgctcagcgggccggctggcgccgtcgcgctgaacctgacacaaagccggtcgaggaggccgtcgcgccgcgtcagcgactcccacagctgaccgggcaaggccttgtcgatcgccatcggcacctctcgctgcgcgatgatgggatccttgaccatcagccagggattgccgcccagatagcgcacgcccaccagccaggcaaagaaaccccgcagcaccagcaccgcatagcgctgcgactccggctggagcgggccggcgaaggggcgccagcgcgcggaggcgcgtggcgccttggtgccgatccacgccgggtccggctgcgccaggaagtccttgtagcgctcgcagtcgtcggcgcccacgctcgacagcgcggtgcggcgagcgcagatgcaccagagcaggaagcgctccagttccttctggtaggcgcgggcggtcttgtcccgctcgcggaagcgggataggtaggcctgcacggcctccaggtcgtcgcgtgccgcgatcaggcaccagccgggcgcgcgattgcggccctcgctgccgtcgagggccggcaccacccgccgcacctgctccagcgggaccagacagctagcgccgtccgctcccaggtccacgcggtcctcgcgcggcgtgtcgtcggccaccaccagggtgcccagcgcttccgcctgggcctgcagccaccgctcgatcgcccgtgccttgcccgtgcccagccgcggcaccggtagataccagcgcttgccgcgcaacgtgatgtacgccatcagctgcgccagcgtctgaatgtcctcctgccgcaacgcgcgcgacacgatggggcggaaccaggcggacaccgggtcttcgggctgcggccgcgacacgtcgtggtcggcggcgcgcaccaggtagtcaatggcggtcttcggccagcgattgaagcgccgtgcatccgccaggcttgccgacaggtatggattgctcaggcagacgcgttcgaccagatggtcgcgcatcgcatcgagccgggcctccagctgcgccggcgtgccgatgccggccttggccagcgcttcctcgtcatagacgcgctcgaggatatgcgcggtcggaatgcggttgagccgaaagcgcagggccgtgaagtcggcgcgggtatagcgaatgacggtggtggcgacctggttgtgttgggccatggcagtaggagtcggcaggtggcctcatcttacctgataacaatatgctgccgtactctgtcccggattgtcgcaggccacgttgcggtcgcggagtagcatgggggactccctgcgcagccccaccggccggggccaccagaccaccgggctcgcgaccggacaccggagggaggagatcccagccgcgcagcaccaccggcaggtagcggggtggtcgccggcgcattttgtggctacactggtgctgtccaacggtcgaaaatgagcttggccgcgctggattgccattctctttcctggccagcgccgtgcttgcggcggacgcgccgcccccgatccccgaagtgaagccagcaaaacccggcaaaatccacaaaaattcaagcctgataatacgcgttatcaggcttgatggtaaaagagatctatggtgcacttcctcattcgccgctcacacaactaaagaatgtaacgctcgtccgcgcggccgaaccctgccgcctggtcgttggccccggccctgtcaccatgatggcgcgcgcgggccagaaaccaaagggtcatcctccgcggcgggcaagatccggcagggcgcgcgcacgccgtgaagtgttattaccggctaatcgagggcggcccacggggccggtgttccgccgagccagctggccgcctatacagtccgacagctgagccgcccgcggctttttcacggccgtcgaaagcgcctcccacggagcggcgactaggccaagtgtggcgctggccaggtgaacggcaccttgggcggagtctttctctgggacctggtggtgccaattggcaatcgccgggcgaggagggcgtggttgtctgctggctggagggcggtgtaagcgttgccggatggcagagggaggaattccgccacatcgaatccgcgtatggcgaactagccacaggcaccaggccgttgtaagatcacggcaactaataacccaagcagtttaggtttggtacaatcaatgccgacggtcctatcgattttcggcctgcgcgtggtgatctaccccaacgaccatcgcccggcccatgtccacgtgatgggcaaaggctgcgaagccgtcttcaacctgcactgcccggcggggccgccggaactgcgcgagaactatggcttttcggccagggaccctggggaaaatcatcgacgcactggtcgcccatctggcggcgttgtgccgcgactggagaggcatccatggaaattactgacgacgtgctggccgctgcgaatgcgcgcggcgcggccaaaaaggccgccttcccggcggtggtgtcggtgcgctatgaccggcgcgtctcgcgcgtggtgatcgcgctggcgtccgggctcgaactggcgttttcgcccaaggcggcgcagggtctggaacacgcccacccggcggacttggccgacgccgagatcagcccctcggggctcggcatccattttccgcacctggacgcggatctgtatctgccggcgctgctcgaaggttttctcggctccaagcgttggatggcgtcagagctgggcaagcgcggaggcgcagcctcgacggccgccaaggcggcggccgccagggaaaacggtaggcttggcggacgcccccgcaaaagcaagttgccagccgccgcatgaaacaaggagcgccccttgacgcttcaacagtgaccaaccatgacgcactatcgttgcgaaattgacccgcgcccggccgaactgggcggtggttggcgccttcaattgctcgaagatggcgaggaagttggcggcgccgtgtttcccgccgatcccaatgcggacccgcatgccggcatggtgtggttcaacgcgctcgcggagccggaacgcgccaggcggttggagcagggctgcagtgcccggcctgtagacgcctgggcggcctgccaccgctggaagcctataacgacgcggaggccacggcccagggctggctggcgtcacggcctcaataaaaggctaaggcgcccaagggtacaccgcggtagctcatcggcagacggccccatcgctctgaatggagaccaccaatttgccccagcgactgcccggtccgatccggatcgtgaatggtgtcatcagcctgctggcattctttgccggactgtacttcctgcagagtatgtatctggcgtccaccgagcacacgccgatcttaatggggaagtaccaaaagctggtgcaatacgaaaaccgccccatcctgtatctgttctctgcgacattcaccgcggtcgcggccgctgccgcaacagggtgggcgtttgggggatggtgaaggcacttttgggtcgtccatagcgaaaccatgctgccaaactgctattgaaggaaaacgcccagtggttatctggcaaagccgaaagggttcgccatcaaccgtcgaggatcgtcatgcagcgcctgcagcttgttatcagtcccgcccacttcgtagatcgcttcggtcgccgcgtcttgaccaatgctggccagcctggcatggacggcaaggagggggtcggttcgaccactgaggaacagcgcaaccgcgtggcggccgcgatctatgccaattgcgagcacctggacaatgcgcagctcgatgagatcgttgcgtgggtgcggttgtacaggaagaagtgacggccgcgatgttggggacgccgctgtggccttgggatacgtctggggcggcgcaggccattggctgtcctagctagtcctagctgcgcgctgacttgtttgaaaacgccccgacaccataggaaggccagatgcagagaatcaccgaagccgtcgattgcgcgctgtgccacatgccggcatcgcgctgggcattgcggcagagctcggatggctatatgtatgactgcccggcctgcggcgggcgctacagcattggcacgtcggcattggcgcgggcgaagaatggagaggtgccgcccggcctgctggcagacgtgcgccacgccattgcccgcggcgacatcccccgggtcggcaggactgcgagcgaatggcatccactggacgtcgtgggacgccaggacgcggatgccgacctttgagtgaaaacgtccctaaatcgcaccgggacaaacgctatgccagaggacgaccgcgaacgccagtttggcgacaccataccgcctccccgcaatcgcttcagggagcggatcttgatggtccgacttgggccgatcccagactccacggcccaccaccaccattcctcttcttgttgacgaacgtgggcgagcccgccagcctcgtgccggctgcacgagctcacccgcctgtgatggcgatcggactagcgtgtccagcaggacaaggcaggccggtcgtaatgaaatggtcagcccgatcccccgatgcatcgcctaggctggaggggtcactttccggaggaggctgccatgagcgaagtcacgttgatcggcattgatctcggcaaacatatgtaaagctgctacctcgaggctgcacaagagattcgagccgattgccataacccactgcgacaggtcacctggtaggggctcagcgtcgcgccaagtgtggcagccgtggcgtcggccagcgaagaaagcgccccgcggcggtgcagatttccggcgggttgccgagaaaggaggctcaaatgtcctcacaggaaaacagcggccatgtcgaacaaggcaatggcaaccgtgtcgaagctggcgctagcggggctgcggcatggcgccggtgcggtagccggagcccggcgcggcgccaagcagatacgcaggcttctgccggcagactccttcgcgcgttcggctgcgcagcgccgctgcgccgtcagtcgtcacgcgggcaaatttcatttgttggcagcgatggcgagcaacgctcgagggagcgatgtagatacgcgttgaaacatggatctcttatgtttatacttgtatcaacattgtttggaggcatctattatgcgaaaaagcgcaaccctgacgattcaaaagtggggcaacagcttggcggttcgaatccccactgcggtggctcgttctgcacatttcgccgagggccaggaagtggaggtatccgtcgatgagattggcgtaactgttcgaccagttggtcgtcgtgccctcactctcgcggaaaagcttgctctgtttgaccccatcaagcacggcggcgaagctatggccacgcagcgtgtcggcgcggaggccatgtaatggcgggcaagctatgggcgcctgaacgacgcgacattatttggatcgactgcaatccgcaagccggccgcgagatgaaggatatgcatccgatgctggttctttcaccgcggccgtttaatgaaaggactagtattgtgattggcttgccgatgactacggcagcctacaacgagaccaatccgtttgcgatcaagcttcagggaccgaagggaaaggacagctacgttctggctcatcaacccaagtcgtttgactggcgagcccgaaacgcaaaggctcacccctggaagcaagcgcccttggaggtttttgctgccgcttgcgagcagctaaaccagattatcgcgatcgcggagtaacctccatgcttgaccgcatggcgcgttgtcttggcgaacacgccgagccgtcgcaagctggtcactgccagcgcacacatgcggctcgactggatgaagccagccacggtagacgtagacgtgatcagcacatcaacctgaccaccgagcagatcattgatggccgacccggcgcccttgtacggcacgtgctgcagcggcacgctgctgttcttgtcgagcacaacgcctatcaggtgcaacagcgtgccgatgccgggcgtggcgtaggtgatcttctgcagttgtgccttggcctgtgtggccagcgccgggcagtgggcgggactcgtcgcgccgcgcggtccgcgtgccgaagtcactgcgccgcccaaggttcgcgctgcggaactgggcgccggcctgcgtgagcgtcaatgctggcggcggcccccccggcagcatggcgcgccgccaaccccatgttgaggttgtgtcccggcgctactggtcaacgcgcacaatcaacctcacctggcgcacaacctacctcaccgatccctgccggctgtttccttccagcctttgtccagcttgggagataagacatatgcacaggtcacgcacaatacatctcaccttaggggcatcaacacaacaaacctcaccttcttggggcggcttcggatgcggtgccgttcatcaggcatcgtgtccgccgtaacggggatgtcgatgtacaaacagtagtcggcaaacactatgcaaatactgcatcgtttcggcctgtcaggaaccaagtgtgcagcgcgcctatcccctttgcctcgattgagccgcgctcttcgaactggaacgactcacccagcaggcgcctggttgcgtcggtgacctgcacccgtccggccacgccgtgggattccatccggctggcgatgttgaccgccgctccccacaagtcgtagatgaacttgcgcttgccgatgacgccggcgaccactgccccgctattgatgccaatgcgcatctgcaggttgaagcccgtgtgctggttgaagtgcatgagcgcgtcgctcatgttcaacgccatatgcgctgcccgcaccgcgtgatcaggcgccggctccggtagccccgctgctgccatgtaggcgtcgccgatggtcttgatcttctcgaggccgcgaacttcggcaatggtgtcgaattcggtgaagatctcattgagaatggcaaccagctgctcgggactcatgcctgctgaaaaccgtgtgaaggccacaatgtcagcgaacaggaccgtcacttctggaaagctgtcggcgatgagttccggaacgccgctcgcgatcaggtccggacgcgctttcagccgttcagcgatcgggtagggcagcagattgagcagcagccgctccgacaatttctgctcggccagaatcctgtcatagaggctctggagctcgtcgcgctggcggcggatcaattcccagcttgcctgcagttcttcgttcttcagcgctagcgcggcctcggcgcgcttcttctccgtgatattgcggccttccgggagcaggaatacgacgttcccgttcgaatccctgatcgggaggagggagaagtcgacaatgatcttctcctcgccctcggcttggccgtagttttcgaagtcgcaacggacaaattcgccctggcttgcacgctggatcagttcccgcagcaacgcctgggtctccggcgagaccacccaccagcgggcctcccagaacggcttcccccgaatgtcgtccatccgaatgccaatcgcctcgagcgcggcacggttgatctcgagcatcgtgccgtgcacatccagcaggcccacgaactggtacatcgcgtccagcatgatgcgcgcgagcttgtcccgctgggtctggaaatcgtcgctcgtgcaaagcgtgacatcgcgcacccggagttgccgggaatcagggaacacgaggctaatggaagccatgcttcacctcctggtgtctcgtcgcagcgccacaggggccggctctgacagcgatgcgggcacagctcgcgccccattgtggccggcgcacgccgagcacgggcccattccatgagaaggccgtgaccaccttgaaccatagcttgtcgccgccaaaccggtcctttgcatacgcctcgtgccgccattgggggaagaagctggttcccctagcactcgtataagacacactcgcgccgattgcaagtacctcgccacgtcggccccggctccagacgccgggcaattccggtaccacggcgctaggcgttaatgggatggacgccccctccccgtgaaggtacatgagtgccaaactggtgagcctggcaacctctcaaaacaggagcatccctcatgaaggtcacgacgatcggacccgacgaggcttcggagagaacgatccagttcccgtcagaactccgctgctccgttcacaacccggcgctgacgtacgttagccggattgattggcttcgcccgcgaaggtgtggtgtcgtttccaaacggccagcatcgcgctcgctatctggcctttgctggcgtaggcagcctgccggtcgaggtccatgaaactgaggcggaccgctcgagcgtttttgcggttggggtcgttagcaaacgtctgaacgcttgacgggcgcggctagggaagagtctttgcctggttgccgattgaacacggtgaccggcgccgcatgccaatcagcggctgtcctggccgaaaccgatcgtccggcacgcccggcgtaagtcattcccatgaggtcggagtaccgcacgtaccgagcgatgccgaggtccgtggccagccgaagcgggattgggcccgtttcgccactcgcatgaagcggatccgtccggacgtgctggtgagtaaagtcctgtcaaaggcagcgggtatcgccttgccggcgcgaaccttccagcgccggaaaggggttatttcgattcagtggtgaggctgctcagatcgcagatggatgtcgtgccagcggcgtgacctggatggtcatgtaggggaacaggggcagtgatgacagcagttcgtgcaactcgtcatggcattctacatcgaagatgctgatattggcgtagcgccccgccacgcgccagaggtgtggccattttccggcctgctggatttcgatcgcccgcgccttttcagccgccttgatggcttcggcacggtctgcggggactgagtcgggaatcttcacgtccatctgtacgcagtaaagcatggtgtctccttgtctgttccaggtaagtgggaccggagccggaccgcctccggtccggcttcagcctatgcgcaaatcgggtaaggcggtgcctagccagcgctactctggccgacgacagatgcggtgcgaaatggcttgagccggccgataaaggtcttgccgtgttcgaaccacgccttgcggatgtcggaagccatgtagcggtcgtagtcagcctcgttctcgaaccagcactcgccgatggcgtctacatgcccgatgtcgaagaaaggcacgtgggtgtcggtcggttgcccggcgacgaggcgcacctcgtaccgatgcaggccaggcacatcgtgcgacatctcgtagtggcgcaggcattcggcgcggaatgcttcgtcggtcatgccttctggcttgaccagcaggtacagcatgcgaatcatgtggatcccccttgttgttggaataaccgtggtcaatggccctgtgggcctggaaatcgtccgacgcccttcaggaaggcgcgcgcgccgggttggctatcgtgaccgtgtcgccgtcgtcctcggtgccgatgttctcgatgacaatacctcgagtctcgggcagcagcagcatgccgaagaccgcgaacgcataggccgcgaggcagaatgcgcccatggcattggccaagccgatatgggtggacagcacgcccacgccgacgacggagccggcgccaactgacttgcccacgttgtaggcgaagcccatgcaggtcgtgcgcacgttggtgggaaacagttcgctaaggaacggtcccagcgcggcgaacatgccgatggccgagaagcccaccaggaaccccaggatggcggtgagcgtcgggttcagcggcagcagcatatagctgacggtgacgatccaggcacagatcgacagcatgatcagcgtggggcggcgcccgatgcgatcgcacaggtcggccgccaccgcgaagccgcagaacgagccgaaggccatgatgaagacggtgacgattcgcgaggtggcggcgacctcacgctggctcagcagggacggcagccagaccaggatggcgtagcagccggcctgaagcccgatcaccagcacgctcgacaggatcagcgagcgcgcgtaccggcgattgaacaccgaagccagcgacgcgcgcggcgcgctgctctgccgggcacgctcgaacatgggagcatccttgatatgccggcggataaacagcacgattgaggccgggatgatgccgatccagaacgccgcccgccatgccatgtcctgcggcaaccaggccagcagcagcgttgcgaccaccgccgccagcgcccagccgagagcaaagccggattgcacatagcccatggccttgccgcggtgcttcgggtcgatgacttcagccatcagcgcggcgccgaccgcccattctccaccgaagccgagaccctgcagcgtgcgtgccatcagcaactggtgatacgtctgcgcaaagccggccagcacgccgaagaacgtgaaccagacgatggcaaagaccaggatgcgggcacggccgtagcgatcgctgaggatgccggcgccccagccgccgatcgccgtgacgatcagcgccacggtgccgagcacgccgacctccgccttgttcagcccccaagcgagcgtcagcgcgggtagcaggaagctgaacatctgcatgtcgaatgaatccagggcccagccggaatagcaggcccagaatgtcttcttttgctggggtgtcccagtcttgtaccaagtcagcatgtttgtctcctctctgtgtcgatccgtctggatgggcggccggcgttgcaccctgtgtttgaacaggcaccggcgcgggcgcccggtttcatgcgtattcaggccgtagcagggtggtaaagtcgagttccacgtcggtcaccgactgcagcgcctgtggcgacatgtcgccgacggcttcgatgaccgacacgccgcgcgggccgatggcgaaggtgccgagttcggtgtagacgcggttgacgcagcgcaagccggtcaagggatagctacactggcggcgcagcttgctggccccatccctggtgagatggtccatcatgacgaacacccgccgggccccgatggccagatccatcgcgccgcccacggccgggatggcatcgggcgcgccggtgtgccagttggccagatcgccctgctccgatacctggaacgcgccaagcacgcagatgtcgaggtggccgccgcgcatcatgccgaaggcatcggcatggtgaaagaatgccgcgccttgctccaggcggatggcttccttgccggcgttgatcaggtcccagtcctcctgtcccggttccgcagccgaccactgaccgagcacaccgttttcgctgtgcaggatgacttcgcgatgccggggcaggtggttggccaccagcgtgggcaacccgatgccgaggttgacatacgatccgtcggggatgtcccgcgccacacgcgcggccagcatgtttcttgccaattgatccatcgttctcaccctgcctgcatgacttcagcttgtgcgaccgcgccgtcgcgcagaactacgcggctaacgaaaatcccgggcgtcacgacgtcctcggggtcgagctcgcctagttcgcatacgcgagctacggccgcgatcgtctggcttgctgccattgccatgacgggcgcgaagttgcgtgcggtcttgttatagataaggttgccccagcggtcggcggccgcggcgttgatcagcgcgacatcgacagggagggggtactcgagtacgtagccgcgaccgtcgatctggcgggtctccttaccctcagccagcagcgtgccgtaaccggtgggcgtgtagaaggcgccgatgccgcttccggcggcgcgcaggcgctcagctagcgtgccttgcggcacgacttccagctcgatctggccggcgcggtacagttcctcaaatacgtaggcatcgcgctggcgcgggaaggaacacaccagcttgcgtacccggcgggccttgagtagcgccgccagcccggtgtcaccgttgccggcgttgttgctgaccaccgtgaggtccttggcgccctgctcgatcagagcgtcgatcagttcgtcgggcatgccggcgccgccgaatccgccaatcgcgatggtggcgccatcggggacatcgtccatggcttcccgcgccgttctgtaaagcttatcgatcatgtctcgcgtccttgttgtctgcgagagtaggttgccatgcagtcggtggccttacaatttcgggttctgcaagcagccttagcgttgggttaaggcgtggggaagccgggcaacagcacgcttgcttgcggcgggaggcgcgctatgctcgtcaatctccatagctgcgaaggcgggcgacaacgtacccacgcgagccggtctcgtggctgacaccaagcgggtacggggcaggtgcaagcagggaagggagctagccagcgctgccgcccggtgcgtagcggccgatcagccggttggcgaactcgcgggcgaagctcgacaggccttccaggtctcgcgcgcaaacctggaaggtgcggatggcccagtcatcgcgcaggttgcaggcgccaatcggctgctcgcccttgaggcgcgcgaatgcggcctttggcatgatggcgatgccagccccggcggcgaccatgcggcagatggcgtcgtaactggccacatgcacgcggatggtcatgggcttgtgcagcgcgcccgcagcacgcgtcatgaacatctggaaggcactgccttcgagcagcgcgacgaaggcgtattccagcgactgctcgaaccagacctcgcgctgcgcaagcagcggatggccgagtggtgcaaccagaatcagtgcgcttttgacgaagggcaccgcctgcaggcccgcggtgggcacattgccggagatgatgcccagatcggtggcaccttcgcgcaccaggcggacgatgtcgtcgctcaggcgctcacgtacgtcgatgcgcacgtccgggtggctggcgagatagtcgccgatcaccggtggcaggtactccgtgatggccgtggtgttggccaccagcttgagctgccccgaaaggcccgcagtgaacggctggaggttgcctgtgagccgctccagttcggcgagcaccacgcgggcgtgctggagataaacttcgccggccgccgtcaacgctaccccctggggcgagcgctccagtaagcgcacacccagcgtgtcttcgagattcttgatgcggttgctgactgccggcacggaaaggaaggaacgctccgcaccacgggtcaggctgcgcgtctccgctacattgacgaagagtcggaaatcggtgatgtcgaagggaacggccatgccgcagttctcacgcagaaactgactgtgccacgctcatacccgcgagggcgggtaggcgcgcggcgggaaagcggccgtgccgtggctaccattggtcaccaggtggcgggctcgaagcgaaagccttcgccctgtcggcgcacgtagccgcagtagggctcgccgaaatgcaccggcaagaccagtgactcgcggtcagcggcctggttgaggaaggccaggcgcgtactgcgcgccaagtcggggcggatgcaatagccggaattcacgtcagggcgcacgatttgcagcggactgtgcaggatgtcgccgcagaagatcgcttcctcaccccgcgagcggacgcggaacaccacctggccagggctatggcccgaggcgggctcgacctgcaggcagttggcgatctcctgcccgggcaatatcatttctgccaggccttccgtgaccaccggcatgacactgtcaaaaaaggactcgccgaatacatccaccacgcccggttccttgttgcgaccctcgtcgcagaagtcaaagtcatccttggggatgtagtagcgcgcattggggaaggttggtacccagcggttgtcctgccaggtagtgttccagccgacatggtccgcatgcaagtgcgtcatcaccacatgcgtgaccttctccggtggtgcgccggcggcgatcatccactcgcgcaccagcgtgttgagcatattcatacgcgcaatgccggcgcgcggcttgaagttgcccacgccggtatccaccacgatgatgttgtcgccggcgtgcactacccagaactggatcgtcacgatcagcttgttcatgtgtggtatccaatggtgcggtgccatcaggtcagcgttggcatcgagcacggcgcggtcgatgtccgggaagaggaaggcaggatcatgcgtgggtcccgcgtattcgaggatgcgggtgaccttcaggtcgccgagggtgcgcgattgcatcatgtgccgtgtctccttttctggtgttgcgatggcccgccttgggacctgtctttgcggtatggccaaggcccgcattggccggcgtcaagcatcggtgatcttcatcccgccgccaattttgcattccaaaagaggggtttcaggcagattcacacgtgcggtgcatttcacactcgcatgtatgtcagagtatgagttacaagtcttggggtgtccaagactgaaaatgttggattcgatatctacagggtatcgcagcgccttggcgaatcaacaatacgtcgtgaaacctcctgggttctcgcattgctgcgggaaggctcgcaaagggaagttcgcggttctgcgggtgaccagcgccaagcgcatgcgctccaagctggtggcggtcaaagagcaactgcgcaggcgcatgcaccagaccatcgcggagcaagagaggtatctgagcgcgatggtgatccggcatgtgcggtagtccgggatgccgcgcaacggacagcgccgctagaccgcttccatatttgcattgcccgactgtggtaccgcactttgcgtcgccggggtcagaagtgcggcctaacgtggcagcagatgacccgtctcatttcgcattgggtgcctcccacttacatttgagcgcgtggccgagcatagcgtggacctagagcccgatgcggagcacgtcccggagctggcgactagcgagttgctcgcgcttgaagccaagcaatcaggtaccgaaccagcgtatatgcgagcgtcaacaactgcgctggtcgccgaacaatgtccatttggtcgaccaggcacgatgtgcggtcagtcggcgcgaataccacgctcgcggatcagcacgccccacttctggctttctttcgccaggtggtcgcgcagggcggagggcgtgctgccgatcggctcggcaccgatcaaggccagacgcttctgcacctccggtttcttcagtgcctcgagcatggctcggttcagcgactcgatcactggctgcggggtcttagccggcacgaaggcggcgaaccagggcgatagctcatagcccggaagtccggcttcggccaccgtcggcacgttcagcagggcactggagcgcttggcagtggttactgcgatggcgcgtagcttaccggcgtcaatttgcggcttggccgacgtgatgctgtcgaacatatagtccacctgcccgcccagcatgtcggacatggcagggccgctgcccttgtaagggatgtgcagcatgtcgatgccggccatcgagttgaagagcgcagccgcgaggtggatagaagtaccgttgccagccgaagcatacgtgtacttgccgggcgaagccttggcgtgggcgatcacctccttgacggtgccttcttgccttcggttcttgttgacgaccaatacattgggcaccacggccagcagcgaaacgggcgcaaagtccttgacaggatcatacgtcagttggccgtatagctcggagttcacggacatgccgttgcctacgataatcattgtgtagccgtcggccggcgagcgcgcgaccatttcggcgccgatattgccgccggcgccaggtcgattctccacgacgaccggttgaccgagcgtgcgcgacatgtcgtctcccagcgtgcgggcgatattgtcaatggcaccgcccgctggaaacggcactacccagcggatggcgcggtcgggataggcggcatgcgcggccgcagttgcgaaagccagtgcaaacgaaaggcctgtggcgagtgccactgtgcctgcgcggccggtgtttccccgcagctggaacaatgtcttcatagtctcctctcagggttcaggttcaaatacagcgactaactcaatggtgcggcactcatcgaatcgacgatgggtgcttcgcgagcggcgtggcgcggatcttcgtgtacgggacgagcggcagggccgacagcagcgtgtgcagggcttcgttcgattccacgtcgaggatgctgtagctggcgtattggccgacgacgcaatagagcttctgtcacttgctttcttgccttcttgccttcttgctgcagctgctaagcgtatgcgttttcgggcgccttgatgtcgtcggtctgcgcgagggacatgtcgtgcggcaggttcacatttatacggaccagatagagcatggcaatcctatttcagaaactgtgcgatcaggctcgacggtagtgcgccagtttggcttcatcaatcgtgaggcccaggcccgggccttcgggcaagtgcaggcggaaatcgcggtactcggggcgcttcacgacgatatcgtccttcaccagcaacgggcccaacagttcggtgccccaggccagttgcggcagggtgcagaagccatgcgcggcggcgatggtgcccacggtgccttccagcatggtgccgccatagagcgcgatgccggcggcgtcgccgacggcggcggtgcgcagcatgccgaagatgccaccagacttggcgatcttcagcgcgaatacgtcggcggcacccaggcgagccagatccatggcatcttccggcccgcagacggcttcgtctgccatgatcggcacaatgaagcgcgcggccagccgggccagcgccgtccgctgctcgcgcggcgtgggctgctcgatcaggtcgatgccagcggcttccagcgcggcgatgccggtggcggcgtcggcctcgttccaggcctggttgacgtcgacggtgacgcaggcgcgatcgcccagcgcgcgcttgatcccggagacatgcgccacgtcgtcacgcacgctgcggcggccgatcttcagcttgaaggtgttgtgccggcgctcggccagcaggcgctcggcttcctcgatgtcgcgcgcggtgtcgccggaggccagcgtccacagcaccggcagggtgtcgcgcaccttgccgcccagcagcgtggccagcggcacgccgaggcgcttgccttgtgcgtctagtagcgcagtctccagcgccgacttggcaaagcggttgccgcgcgccaccttattcagccgtgtcatggcggcgtggacgttcgtggcgtcctgcccggccagcgcgggggcgaggtaggtgtcgatggtcagcttgatgccttccggactctcatcgccgtaagacagcccaccgatggtggtggcctcgccgatgccctcgatgccgtcgcagcagcgcagccgcacgatcaccagcgtctgctgctgcatggtggccatggcgagctggtgtgcccggatggtaggcaagtcgaccagaatggcttctatcgattgaattgtcgccttcatgtctgtgcagggtatatagcccggaatggagtgttcgaatgccactaccgacagtgttcaaggtgacgtcagcaagacagatctgacgggagagccttttcagattcgagccctttccactagatcccacggttccgagaaagtcggataccgccgtcacagtgattgcacttgtgttgcgcgatgctcttttgtcttgggatcagggcaatcgtgcaatacgatcgcgcgcagcaacgtactcacgactaagtcgtctcacgatctcggaggtggtaggaatgtcatggatctgcgccacgccatgcccggcgccccagatatccttccaagcttttggcttggagcgaccatccgcaaagctcatcttggatttctcgccttctctcagattatcgggatccaacccaatacgctcgatgctttcgcggacgtagtttccgtgcacaccggaaaataaattgctatagacgatgtcagacgcgccggccttgatcagcgattgcttgtagtccgggctcgcattggcttcctcgctggcgatgaagcgcgtaccgatgtaggcaaagtcagcgcccatggcctgcgccgcaagaattgcatcgccggtggcgatagcgccggacagcgcgatgggaccgttgaagcgacgacggacctcacctaccaaagccatcggcgacagtgttccagcatgtccaccggcaccggcagcgacaagaatcagcccgtcaacaccagcttccaatgctttctctgcatggcgcagattgaccacatcatggaagataatgccgccataggaatggacggcttcgacgatctcccgcaccggcgcccgcagtgaggtgatgaagattggcacgcgatggcgcacgcacgttgctacgtcttgttccagccgcacattggaagtgtgggcaatctggttgaccgcgagcggcccgacaatcgcgccgggattggccgcccgaaaggtgtcgagctcctccctcatcagcgtcagccattcatcgagcaattccggctgacgcgcattcaatgcgggaaatgaacccacgatgccggccttgcattgggctagcaccaattccggatagctcaccgtgaacattggcgacgagatgacgggcaaggtcaggttctgcaggatgggaggcagatggggggcggtagccatgatggtggttcccttgagttgattaagttcggctcaatcgagcgacacaccggaaagtttcacgcgttcgctctggattcttcggtcttgtgccagaaaatccttgaaggccgctggtgtggagcccaccgcgacataggagaacgcatcgatatactttctccggaagtctggagactggacgatgcggctgacgtcagaggaaatcttctccactagcgcggtcggcgtgccatgcggcgccacaaggccgatattgaagaccgcattgatctccttgatccctaactccttgaaggtgggcacatcgggcagcgccgccgagcgcgtgtccgccgagacggcgagggccttgagcgcgcccgacttgacgtgctgctcgatcaccgagacgccgagcacggcggcatcgatctgccctgagatcacttctgggatcagtggcgcggcacccttgtaagggacgtgcaccatggtcagattctcgttatgcgtgaacatcgccatgggtaggtgcgcgatgccgccggcgccagaggagccgtaggtcatcggcttgcttgccgaaaccttcttcgcgagcgcgatgaactccttgagtgaattggcgggcgaggtcttcggcacgaagaacaccaacggtagtgccacgagtcgcgacacctcggcaaagtccttgtctgggctgtacggcagcttcttgtacaggaattggttcatggttagcgcagcttccgtgccagcaaacagcgtgtagccgtccggcgcgctcttggcgacgaactcggcgccgatgatttcattggcgccaggcttgttcagcaccaccaccggctgcttccacgcatcggcaagccgtggcgtgagccctcgcacgaagctgtccaccggcccgccggccgagtacggcacgacgatggtcaccggcttgctcgggaagctctgtgccgctgcggtgccggcaaccgttagggcgaccagcatgccggtcagtctgataagggattgcatggtgtctcctggtgttcgtctggggttgcaatgcgccaccgcacgggcggtcgcggacaggggccccgattctgcgatcggataccccgctgaaacggatcaaggggagagcggcgatgtggcgcgcgctcaggctgcctgggcgtcgcgcttgagcaccagcacgtcggtcgtgccgtcctggatcacgccaccggtctggtcgattaactgcagtcgccggttcacgcgccctacgcgcttgctggtgccggcctctgtttctaggatctccattctgagccgcagcgtctggccaacgaaaatcggggccgcgaaggtccagttctgcagcgacatcatggccacggctgatttgtcaaagactccgagctgatgcagcatgccggtggccagtgcgatgcctagcgcaccgtggaccacacgttgtccgaagcgcgtgcccctggcgaattccgcgtcggcatggatcggattccagtctccagacagcattgagaacatcgtcaggtcggtctcggtgatggtgcggccagtgctctcgaacacctgcccgcgaaggaaatcctcgaaataaagcgtagtcggcatgaaatttttccggaaggggttcacgcgccggcggccgggacaggttccgccagccgcgccagtgccaggtcgcgcagcctgttgcgctgggtcttcacgccgttggagctcagcgtgaccggataggcatcgacgaaccagacacgcgcgggcactttgaacggcgccacttgggcgcgcatctgggccatgacatcggcctcggctagccgggtaccgtcggtgaggatcagaaaagcgaccacgcgggtctgcccatcgatttccacggcgaccacttgcgcatcggcgacaccctcgaagcgcttgagcacggcctcgatttcgaccgggttgaccaggaacccgcccaggcgaatcgcatcgcccatgcgcgtttcatacacgaaagtgccgtcggcgcgtagatggccaaggtcgccggttcggaaaaagccgtcgggacgtatcgcttcagcggtggcgtcctgatcgtggtcataccccaggaacaagctcggtgcgctgatctcaatctcgccggactgtccagctggcagcaacgcccccgtctggacatcacggatgcgcacggtggcctcgccccgtgccaccgggaggccgcctccttcgatgcgcgcctgcgccggcagcgtcatcggctggcaggaaaacaatgcgaggacttcgctcgatccgtacagccctgcgagtggaatgccccgtacgcaagcctcgctggcatattcggagaagcttgaagtaaatgcaccgaagccgaatagccgcgcggccggaaatggccggtccgccggtgccgtgtccaggatgcggcgatacatctcatcgctgccgaatgtgtgcgtgacacgctggtcagccagcagcctggcggcctgaggcccctcaaacgtctcgagcagtaccacgggcgcgccccccgcgaacgccgccagcacgccattcagcccgaatacgccgcagaacggcagcatggccagcatgaccgcaccatccgcatccatgccataagcgtctgcacaacgccaggcatgatcgacgagcgtgcgttgggggtgcatcaccagcttggggcctttggtggtacccgaggtcgtgaacaaaatggcgcaggcattgggatcggattcatccagcccttgcaccggctcgcgcagatgcaaatcgaaaggcaccaccgggcggcctaacagacgggcgggcgttgccggactggcatccaccaccgcgatggcttgcagcgtgggcagcgaggcgggatccatggcatcgagaatccgggagaagtcgatctttcggaagcccggttgcagcaccagcaggcgggcgccgctcttttcgatgaggtagctcacctcttcactacgatagcgcgtgttgaccgacaccagcgtcgcgccgacgcgcgccagggcaaagaacagcgccagccattcgatgcgattgacgagccacacacctacccggtctcccttgccgataccctgggcgtccaaccaggcgactgtgcgacggcacagctgatcgaactctgcatgggtgatggcgcgctcaccctctatgaatgcgaccgcatccgggtgctctgccaggtgcgcgtcgatcaggctccacagattcgtcttcatgcggcctcccataccatattgctgcattcgcagcgtgttgattgttgttcatccatacacttgctgccgcttgttcagatcctgcgcccggcatgctgccagtagccatcgcgcagcttgcgcttgtgtatctttccgctttcctggcgcggcagttcggtgcgcagttcgatcaccttcggcaccttgtaagcggcgagccggtctttcagccacgcacgcatttcctccggatccaatcccgtgccgtcagagggctgtactactgccacgaccatttcgccaaactcttcgtggggcacgccaaacgccgcgcagtccgccacgcccggcatgccggacagcgcgtcttcgatttcggccgggtagatgttcacaccgccggagatcaccatatcggccttgcggtcgcagatgaacaggaagccgtcggcatccacgtagcccatgtcgcctacgcacgccagtccttcgcaatccatcgcggcgcgcgcctcagggcgattgtggtaggtaaagtccgcataagcaggctggcgcacatggatgttgccaacccctcctgtgccgaggcggcagcccgcgtcgctgtagatgcgcacctcggcctcgctcacaggccggccgaccgacccgggcttgcggatggcgtccgcggacgaaatcacggtgatcatgcccatttcgctgcacgcatacgattcgttgatcactggcccccaccaattgatcatggcctgcttgatggcaacggcaaagggcgcgcctgtacaggcgacgaagcgcacggacgacaggtcgtagcggttgcgtacgtgttgcggcaacgccagcaggcgtacgcacatggtgggcaccaggtacaggtgcgtgatgcgatggcgctcgatggcgcgcagcgtggcttcggcatcgaagcggggatccagcacgaccagcccggtcgccagcatggcctgcataccgtagagattgggggcgccgtgatacagcggcgcggacaggtacacgcgcgcatccgcggaaaaatcgaacacggccttgacggtatcgcgcagcaggcgcggctgctctggatgcaggccctgcgcgaggcgccgcacgccttttggacgtccagtagtgccggaggtataggcgaagcgtccgcgcggccggtgcgacggaccgctgtacgccgcctgtgcgctgcgccatgcttcatagcgaaggacgtctgccggcacttcgccggtaacgcgcgaagtgggataagcctgcaaggccaacggttctggcgtgaccgccagtacgcgcaccccttccgggatcgcggcacgcaatgttgctaacaggtccgcctcgatgaacaggacacaggcaccgctgtcctgcaggatatagcccagctcatccacggtgaaccgccagtccaccggacagtgatacgcgccgacgcggttgcatgccagcgtgatctcgaacagcgcgggcgcgttgcgaagcacgatggccacgacatcgtcctctcccacgcccagggcagccaggccgccggcaacctgcgcggcgcggcgttcgatctcagcgccgtcgaaccgggcttcgccatattgcagtgaggctaccatcaactctctcctttgcggtacgtgcagttattctggctgcagcccggcgtccttcaccaggcggccatggaccgccagttggtgtttgatcagacgaccgaacgcttcaggtgaagaaggcgtcaacggaaagcccagccggtccatctgttcgcgtaccttcggattgttcatcgcggcaacgaatgcctggtttagacgggccacgacgtccttgggcatgcccgccggcccgaccagacccgcccacggcatgatctccaaatcctgcatgcctgcctcgcgcagcgtcggcacatcgggaagtaggctgtttcgctgggcattgatggagaccagtgcgcgcagtttgccctcgcgcagataggacgcgccgatggtcgtaccgatcatggcctgggtgcggccggcgatcagatccagcatggccggcggctcgcccttgtagggcacctgggtcagctcgatgcctgtgagtgtcttgaagtgcgagaacgcgaccacgccggtgttgttgccggtgccgtaactcagcttgccgggattggccttggcgtaggcgaggaactcgttcaggttgctggccgggacggcagggttcacgtacaggaaaaagccgaagcgaccgacatcggcgatgggcgtgaaatcggtcagcacgtcgtagggcggcttcttgcgcaacgccggcaccaacgacaggttgcccgacgtggcgagcagcaaacggtagccgtccggtgtcgctcgggccacctcctgcgcggccacttgcccttccgcgcctggcttgttgtcgatcacgatgggctggccaagctgggccgatgccgcctggccgaccacgcgggccactgtatccgtcgttgcgccggcgggaaaaggcaccactagcgtgatgggcctgacgggatactcggcctgcgcattcgttgcgattgtcgcactacaaagcagtagcgcgggtatgatccgcttcatgtctcctccgcctttttaacaagcaaatcgggctttgggagagtattgcatccacttttcaggcacgtaagcctgcgcttgcgcacaggtgcgttgcgcgcagcgcaccaatcgctgctcaaaccatggaactcgacgcttacttgtttttcgccacggttgtggaatctggcagcttcatgaatgcttcgctcaagcttggcattgaccgctccaatgtcagccggcgcatccgtaagctggagcgcgatgtggaggcgcagctcgtacggcggagcacgcgccgcatgagtctgacggaaataggcgaggcgttttacgcgcaatgcgccgtcatccgcgccgaggtagagcgcgcggacgaactactgcacaccttcggcacttccatccgcggtccattgcgtgtgagttgtccaccggcggtcggccgactgtacttgaccgctatgttcgccgagttctgcaatctgtatcccaaggtatcgctgtcggtgagcttcaaaggcggtgccgtggacctgatggaaaatgatctcgacctggctttgcgggtcaccaatgaccccggagaacattgtgtggcgcgtgccctcgggccgatcgaatggatgctatgcgcgaatcccgagtatttggagcggcatggtcgaccggtcacgccggaagatttggcgtctcatacctgccttggcgtgcgcacacgtgtggggctggaatatgtgcgagaaggcagtgacctcgtgcacagggtttccatccaaccgcatttggagtgctcggactatggtttccttggcgaaatggctgcggcaaagctcggcattggcttgctgccttcgtatgtcgcagtagaacatctgcaaagcggtaggctggaaaccgtcctaaacgaatataggctaacccgttcgcctggcagcacactgtatgcgatcacgctccctaaccgatacacgccgccgcagttgcgagcatttattgactttctgaaatccagattcgagcagggcttgccttgggagaaagacttgatgcgaacaggcgcatagcccccgcgagtgcaaggcccagctggcagctgctatgcttcgagtctgggcaaaaaggggcagctgaagcctgaacagcgcgaagcgtgctcgttcatcgcggcgagtttgtagctgcgttggaggtgccgatgcggcgagacgctgcccaaatgggcctcgcgagcccaaaagcaagcgggaggagctaagcccccgatcactggagcaaaggtttagccagctgaaggggcggccagcttcgaatcgacgttggtcacgttcgagcttcgcgttgcaagctgccggcttgttgcggatctcacggtgagccaggtatgcagttttgtcgcttatgtctctctctcaaaagaggctcagcagtcggttgcaggcttattccagcggaatgccggtgtccttgaccacgcgtgcccaacgctcgcgctcgctcttgatgaaatttccgaaatgcgtgggcgtatcgccgccgggcacgccgccaaaatcagccaggcgtgatttgacctcgggctcggcgaggatgatagccacggtcctctgcagcctgtcgatcacggccgaaggcgtgcctgccggagccatcaggccaaaccacgcagtcacctgaaagtcctccaaaccggcctccttcatggtaggcacgtctggcagctcggggacgcggctcgcgctggtcacggccagtgcccgcaatttgcccgactggatatgaggcagggagctggggagattatccaccatcatggttacctggccggcaaccaagtcggccacggccggtgccgcgcccttgtagggcacatggataatatcaataccggtgcgcttgcggaacagctcgccagacaaatggaccgactggccagtgcccgacgaggcgaaggagagcttgccgggctgggccttggacagcgctaccagctgggccaccgtacgcgccggcacattcgcatttaccacaagaacgttggggaccgacaccaccatggtgaccggcgcaaagtcctccgcacgataaggcagttgccggtacaagctatagttgatcgcattgggtccgatattgcccatcatcagggtgtagccgtcgggagcagattgcttgagcgcctgcacgccaatgatgccggcgccgccggcacggttttctaccactaccggctggcccaggagttcggccatgcgtttgccaaccagacgcgacgcgatatccgtggtaccacccgctgccgcaggcacgatcagccggatcggcttgtcagggtatgccgccagcgcagcgccgggctcggccaatgccaccacaccaacagcccacgtcatcccggctgtcgccaataccagcctggcgattgccagccgcagcatttcaaggccttgcttcatcgtcgtctccctagttgatcacgccaaagcgtgcgccgccttttattagatttgcaccataggcgtgccaaatacagtagggcgacagcggtgacattggaattcacaattcacaaactaggccttcgacttgacgaaacgcatgatcccgacagcaaagaacctgccggcctcatttccgttccgacccgagcaaggtcagcccaatactggctgtccaggcagacttgcatggctgatctcagcaccgatcgctgaaaacgggaaaacaattgctgagttcatgaagtgcgccttgtcgcatcttcgagcgcaccggctgctacggaggaggccgtgcagaccgacaatctgcgcctcccgatcgagaggcccgcgacgtgcccagtcgcatgcgagagcggttgggtgtgacctgacccgcctcagcagaacggcggtgtcccgtccttcgcgctcctgacgatggatatggttttccccgagcgacttgccgccctggccctcggcaacgcccgacagaggcattgccaaattgcgagaagcgttgcgtggtcgcattaccgagcatcatcgcactaggctcagactgcactggagatcaatcggcgcggatcccgcgcgcccggatcagctcgccccacttggcggtctcacgcgccaggtggtcgcgtagtgctgccggggtactgccaatcggctccgcgccaatcgccgccagccgtttctgcacggcaggattgcgtagcgcatcgagcatggcttggttcagcttctcaatggcggcggaaggcgtgcgtgccggaacaaaggcggcgaaccacggcgatagctcatagccagccaacccggactcggctacggtaggcacattgggcaacgccgtcgagcgcttggtggtcgttaccgcgatggcggtgagtttgccggaatcgatatgcggctttgccgaggtgatgctgtcgaacatgtagtcgacctggccgccaagcaggtcggtcatggccgggccactgcctttgtagggaacgtgcagcaggtcgacgcccgccatggaagtgaacaactcgcctgctaggtggatcgaggtgccgttgcccgccgacgcataggtgtacttgcccggccgcgccttggcattggccaccacctccgcaaccgtcttcactggcgtcttggccttgctcgccaccagtacattgggtaccacagccagcagcgacacgggggcaaagtctttcaccgggtcgtagccgagcttgccgtacagggcgggattcaccgccatgccgttagccacgatgatcatggtgtagccgtcggccggcgcgcgcgcaaccagctccgcgccgatgttgccgccggcgccggggcgattctccaccacgatggcctgaccgagcgtgcgcgacatatcttcacccagcgtgcgcgcgatattgtccatcgcgccgccggccggaaacggcacgatccagcggatcgggtggtcgggccacgctgcatgggcgggcgcgctggccgcggccaggacgagcatcagcgcggcggcgccggtgcgggcgtcaggtgtggtcaatggccgcgggaacagccgctgcagcagggatttcatttgtctccgtgtcttttgattgaatcgttcagcgtatcgacgacggatgcttcgccagcggcgtgaccgcaagcttcatgtacgggaacagcggcaggcccgccagcagcgtgtgcagtttgtcgttggattcgacatcgaagatgctgtagttggcgtattcgcccaccacgcggtagagctgctgccacttgccctggcgctgcaggtcctgtgcgtaggccttctcgcgcgcctttatctcatcggcctgggccgcgggcatgtcgtgcggcaggttgacgtccatccgtaccagataaagcatgaggatttctccgatcgtgttggggcggctgaggttcagccttgcttgcggcgatagtgcgccagcttgtcctcgtccagcgcgagtccaaggcccggcccctgcggcaggtgcagcgcgaaatcccggtactctggccgcgccgtgacgatatcgtccttgagcagcagtggcccgaacagttccgtgccccaagcgagctgcggtagcgtgcagaagccgtgggcggcggcgatggtgcccacgctgccttccagcatggtgccgccataaagcgcgatgccggcggcatcgcccacggccgcggtgcgcagcatgccgaagatgccgccggacttggcgatcttcagggcaaacacgtcggcgccgccgatgcgtgccagctccatcgcgtcttccggcccgcacaccgcctcgtcggccatgatcggcacgacaaagcgggcggccagccgggccagcgcggcacgctgttcgcgcggcgtgggttgttcgatcaggtcgatgccggcggcttccagcatggcgatgccggtggcggcctcggcctcgttccaggcctggttcacgtcaacggtcacgcgggcacgatcgcccagcgcgcgcttgatcgcggccacgtgggccacgtcgtcgcgcacggcacggcggccgattttgagcttgaaggtgttgtggcggcgggcttccagcagttgctcggcctctgcgatatcgcgcccggtatcgccgctggccagggtccataacgccggcagcgtgtcgcgcacggcgccgcccagcagcgtgatcagcggcacgccgaggcgcttgccctgcgcatccagcaatgcggtttcaagggcggacttggcgaagcggttgccgcgcgccaccttgttcaggcgcgccatggccgcatgcacgttggcggcgtcctggccgaccagcgcgggggccaggtaggtgtcgatggtgagtttgatgccttcgggactttcgtcgccgtaggacaaaccaccgatcgtcgtggcctcgccgatgccttcaatgccgtcgctgcactgcagccgcacgataaccagcgtctgctgctgcatggtcgccatggcaagctggtgcgcccggatggtcggtaggtcgaccaggattgcttcgactgccgtaaccgttacatgggtcattcgatacctttacggtgcaatttgagttgcctctgagtatgcatctcgaccgtatgggtgtccaagaccattcgtgtctgatagcataccgtacaggtatttctggggtccgatatggagcttcgccacttacgctatttccagaccgtcgctcaggagttaaatgtgacgcgggcggcttcgatcttgcatatggcccagccgccgttgtcccgccagatccggcagttcgaggatgaaatcggcgtggatctttttcaccgcgtcggtcgcggaatgcgactgttgcagatcgccaatacccccagcggtagccgctatatccgctagcattcacctcgatccaactgattgatccgtaatggatctctcgtccgttgtgacgtctacattgttgctggtaggcaacgcgttttggggcgttgggtccactaattccgccagcctgggtcacccgttcagtaaatcgcctaatgtgactgagaccactgtcttggacacgcgatgaggattgcaacgaagcgcgagctggcgattgcgagggtcttgcgtccgcttgggagggctcctctctcgcgtaggcaagccgagaatgctggcaaattgcttggaatccattgggcgacggtttaccacttgcgccggcgcttcctcgcggatccggtggcgagcgcgttgataccgtatgaacgaggtcccaaagtgggagatacgcgtctagcggcgactgtcgaggaaattgtgagggaggtactttccgattggctgccgcgacagccttatcttgctcatccgctcttcgagctggtcgtcgaaatccggaagcgatgcgcagcggcaagtattagtccgccaagcagatctaccatttcgcgacgctggcgcgcacatcgggaagaagaggcacttcggctcgcaacgctgccgggttctgagattcccccaggccatcttgtggcgcgctgtccgatggacattgtgcagattgatcacacgctggccgatttgatgctggtggatgatgcgagccgacgccccattggccggccatggctaagcatcgccctcgatgtttcgacaagatgcgtcgttggcgtatacgtcgggatggaccgccccaacgcggcaactgtcgcgttgctattgactcgcgttgtcttgccaaaggatggctggctcgccagcctcgatgttagcgttgattggcctatgcacggcattccacagctacttcatctcgataatgcggcggaattcaagagcagggcattgcgagcggggtgtcgggagtacggcgtcgaactgatgtaccgacctgcggggagaccgtacttcgggggccatatcgaacgtttgatgaggaccatcatggaacgtgtccacagtttgccagggtcgactggctcgtcacccaagggccgcaaggccagaccgccggagaaggaagcctccttgacgatccgggagtttgagcggtggctagttctcgagattgccgaacgctatcaccacaacgctcaccgcgggctgcagggcgccactccgttttcgcagtgggcgacggcgggccaaaagacgcctccacgcttactccccaatgcggcgcctgaaccattgcgctttctaatccagttcttgccgatgacttatcggaccgtgcagtcagatgggctgacgctgttctacctgcggtactggcatccaatatttgccgcctggcgggcgaccaagcagaaagtcattacaagataccaccctgaggatctctccagaatctttgtcagtgtcgacggaaagcactacgttgaagcgacatttgcggacttgcgtcgtggccgagtgtcattgtgggagcagcgcagtgcgttacggcgcttacgatcccaaggcaaagagtatgtcacagaagcgaaggtatttgacgcgattgatgagcaacgtcggattgtctcccacgctagatcgcaaacgttaggagcaaatcgtcaaggcgaagctctgaaggaactgtcgccacagagccttggcgaggcgccaaactcggtacgtgcaaacacgttggacaagcaatctgagccggcagtggattacaacaagccgcccccagtgttcaatgtcgagccgctgtaattgcaatgcgcccgctgctaacacatctgctcccggccgcgagagagctggctatgtgcgacgatggtgtcagaattaaaggcttggcacgtagccattggatagattacccgcgcgcaacccaagcactggagattctcgagcgtctcctccaaacacctcagcgggagcgtatgccgtgtctgttgctgcacggagattccaacatcggtaagacgcagattgtctccaagttccagcgtcgtcatccacccgagtacgacgaagggaagggcgtcgagttgcgaagtattgttgccatgcagatgccaccgacaccggagcagccgaggttctattcttcgttgctcttcgaactgggtgctcccttcaacgcggcggcaaggctatctgcgcttgagaacctgagtcgtgccttgcttcgaaaagtctcggcgcgtatgctgatcgttgacgaggttcatcacttgttggcaggcaactatcgggagcagcgtgcatccctgaatttgctcaagttcctcgccaatgacttgaaaatcgcggttgtcctcgttggcactcaagacgccgtcttggcgctccaaacggatcctcagatggtcagtcgattcgcccgtttcgaggtgccgagatggcaggagacggaggcatttcgttctcttctcgcagccttcgagatgattttgccgcttcgacgtccgtcgaatctcgcacggcgagagatcgtacatgccattctgactgcaagtggagggctaaccggggaagtgtcgcgtgtcttgactgtttccgcagaactcgcgatccgggatgggaaggaggccatcgacctgggtcacatagagaatgcagcgcgaaccctgctctcctgagggtgtcaggccttggcccgttgctccgcgtccattcgatgacgaagcgtttggcggttggctcggtcgcctggccgcaaggtatcagatcagtgttgaccagttgtggcagattggcgaccttggtgcgtttccggcgttgaccaattctggctggctgctatttcccccgatggatgagcaggcactgtgccgccttgcgatgctgactcatattggtatgccaaggctcgaggcacttcaaacacctatggcgtgggtgtcagaccgagatcagctcccatactgcttcgactgcctggttctgaatcccgtcgacgttttctcgcctcgctggaagcgggattggctggatccgcacacggctgtctgccaagtccctggccataggctgaattcgctcccaccatgcacgctacgcatctgccgcaacctcactgcggtgctccgtgcgatcagcaagcgtcagcgcaaggggtaggaaaaagcggtcagatctccatattggcggaaattgtgaccaccattggcggaaataacgatctgcaacacctggacaacaaccggcacttcatcgtgaactacggtgaccgctttcggcatggggagcccattgcatcaggttttgtcgagtcggccgtcaaccaggtggtcagcaagcgattcgtcaaacggcagcagatggcctggcggcctcggcacgcgcacaacctgctgcaaatccggaccgccgtgctcaataatcatctccggtcttacgttgaacgatggtatccctccatcgtcggagaacttgccgcttagttagcccccagtttggcgcggtctcctactcgggcaccgggcgaagtccgtggccgaactgctgtcgacctacgcggccttgctcgcccatggcaccgagatcgatgccaagggcattgctgcgatgattcccggcatcgacgccgctcaggtgtcacttgccatgcgcgggctggagacccatggccgtttgcgcagggccaacgaggtggtggctgaatttcaaggaaagatcccattagccacgcactggggcaccggaaacaaggcatcggccgacatgatgtcactggacgtttcacgacatctgtggatcgctcgtgttgatccacgtcgacgcacctacgcgaccggcatctacacccacgtgctcgacaagtggggcatcgtctatgaccaaccgatcgtcttgaatgagcgtcaggcaggggttgccatcgagggcgtagagcagcacaaccgcagcgaggaccgtatccgcctgtcgttactggcagtggacacccacggctacacgaacgccgcgttggccctggccaagggcctgaatttcgacctatgcccgcggctgcgcgatctggcagagcgcaagctgtacctgcctgcagcgttcaaagtgccggaaggcatcgagcgtgtcaccacgaagcgcttgtccttgagagccatacgcctgggttgggacgatttcctacgggtgctggcatcgatccgtatcggccgcattagcgctgagctcgcgatgcaacggttaggcagcgccgccaggaccaacaaggcgcacaaagctgccgagcatctcggccggctgttgcgtagcatcttcctgtgcgactacgtgaccattgaagacttccgccgtgaaatccatacattgctcagccggggggagtcggtgcaccagctgcagcgcgcgatccatgctggccgggtaccacacgaacgcggccggcgaggcgatgagatgacggcgatctcgggggcacacgcgcttctgaccaacatcgtactggcgtggaatacgcaccgcatgaacgatgtcgtcgagcgacttcgcaaggggggcacgaatatcgaggacgcttggctgcgccgcatggggccagggcatttcgggcacatcaacttccgcgggatcctcagcttcggtgtcgagcgctacattgacgcgctgatccaaggccgccgcgcaacaatccgacaggctatggcatgaccgcaacatcaaacgccgcagagcaaaatctgccacagattggcacaccgcagtggcttgaggccgagatacggcagtacctttgcagcggcagctacgacagcagcttcgcaggctggccaggcatgaactttgtcgacgttgcacaaaaggcgaggcagcgcctgctaaccgcgctcgcggaagagacccttgggcgggcaaacggctttggctaccaggtaaccttgccaagcgatctacatgcgtggacgcgcaacaagctcgcaccaatggtgcacggcctgtttggtgctgatgagtgccccgctatcctgggtatgctcgcccgcaacgtcgtattcctcacggggcagaacattgtcgcggtcctcatggagcagcgatggctgtcgacagcctggaacctggcgaacctctatctgtatagcgtgggtgcacccgctctctcgcagcaggcctgccacatcgagggcctgagccaggaaaccacctgctatgtctcgatgtcctacttcgacgaaaccgacccgttcgcagatttcgtcgtccacgaggcagcccatgtcttccacaattgcaaacgaaccaccattgggctgggcgagagccgtcgccaggagtacctgcttagcatcgactacttcaggcgcgagacgtttgcttacgcgtgcgaagcctatagccgcatcagttcgatggctgcaagcaccaggctgcggcagcaattactcgagcggcacggcgaagccttgccgcccccggacgaccgggtcgatcacggcgaatatctcgacatccttgccgaggccgtacgggctcgcaatggctggcaacgcatcctcaaacggtgtgccccgattcagaggcgccaacctcacgtcacgaatacaccatgagaagggatgggtgcgaggaagagtgtcgtcaggcactcaaggcattcctgcacgcacagagcccccacgtgctggcggatcggctaccgcagtcagctgaccgcggcagcgcgatcaacacggcgttgcagcagtggcgcaagatcagcgcgctgcaggtagccgatccgttcggcgcaccctaagcatggtcctcctccgtgtgccagcttcgcaagggcggagacggtgggcaagcgtgccaatctgcaaagaaaggacggtgcagcgcgaaacggaggattactaagtcattgttccagaacgtatttttaagcctgaccgtatcaatctgctgcaaaaggacgaattgaaatgaacgcgtcccacccgtgggcggtggggtcaagggatcttgaggtcgatcctcacgggccaacgacatcgaagtgtccaagtgggaagatgtacacatttcccggcaaccggaggatcgtgaaatgaattctatggccgtgggtgtggatatcgcgaagacggtgtttcaggtgcactacatcgaccaggcaacgggcgagatcgtgaacaagcagatcaagcgagccaagttcctcgagcactttgcgaaccgtgctccctgcctaatcggaatggaggcgtgcggcggtgcacaccattgggcgaggcagctgacgaagatgggtcaccaggtgaggctgatgccagcagagttcgtgaaggcgttcaacatccgcaataagaatgatgcagcggatgcccgggcgatctggctggcggtccagcagcccagcaaggcggttgcggtgaagaccgagatgcagcaggcaatgctggccctgcaccgtatgcgtgagcaactggtgaagttccgcaccatgcagatcaacgcattgcgcggtctgctaacggagtacggcgaagtgatgggcaaaggccggacagccttggataaggcgataccggaagtgctcgcccgggttgccgagcgcttgccggcggcgctggtcgagacattgcgcgagcagtggagtggcctcacgaagctggacgaacagatagccggcattgagcggcgaatgcgcgactgggtcaaagaggacaaggctgtgaaggcgatcagcgagatccctggcgtgggactgctgacggcgacagcaacggtcgcgatgatgggcgatgcgaaaacattccggtcagggcgggagtttgccgcgtgggcaggcctggtgccgaagcaaaccggatcgggcggaaaggtgaatctgcacgggatcagcaaaagaggcgatacgtatctgcgtacgctcttgatccacggtgcgcgcagcgtcgtgacgcgtgctaaggatcccggtccctgggtggagcaaatgacaaagcggcggcctttgaatgtcgtggtcgttgcgctggccaacaagatggcgcgcatgatatgggcgattctggcccatgaccggccgtaccagaaggattacatcagcgtgaagccggcttgagcggtaagcgccacgttggagattagcgttcttacagggtgaaacgtcgaaggttgcgttggtaatcgagtgtgatgacaagtcaggtaggaccgggacctgctaagcctgtggggtaatacgagccttgagctcgcagtacgaatgaggcgcgggtcagcgtatttcataggggccagcagcggcgataccggctgcaagagggccgaatatagagctgcagcccatcctgtcagtgtctgaacaagcgaaaacctggcgcaaacgggacgcgttcatatagattacccctacctggacaacaaccggcatggcatcgtgaactacggtgaccgctatcggcatggggagcccattgcatcagggttcgtcgagtcagccgtcaaccaggtggtgagcaagcggttcgtcaaacggcagcagatggcctggcggcctcggcacgcgcacaacctgctgcaaatccggacggccgtgctcaatgaccagctccgctcttacgttgaacgatggtatccctccatcgccggagaagaaaaccatcgccttgccgcttagtcagcccccggtttggcgcggtttcctttaacgacacgggggcaagtacgccccgttatttttggacgatggccaactgcagtttggcgcgcttgcgcagtagatgggcaggcagattgctcggcgcccggctgcccaagactagctaaacccctatcaggcgcaaggcaagcacgaagcatcagtggatgcaaactgagattcgagcacacccttcgccatctccagaggttgcttctgtactgcggtcagtgcagcttcacgtgtggctcggtacggcgcgtgatcaaacgtgccagcgtgtccaacgccactttcggaaagccatgcagtgcgagttcatgcatcttgtagagcgacagatacatcagccgtgcgaagctgccttctatcatcagattgccaccgctcagaccgcccatcatattgcccactgtactgtattcgccgagagaaaccagcgaaccgaagtcgcggtaacggtactggcgcaacggcttgccgcgcagacgccgcaggacctggccaacgatatgcgaagcctgctgatgagcggcctgcgcacgcggcggaacaatgctgttcttttcgggccacggacaggcggcacaatcgcccagtgcgaagatgttgtcgtcgagcgtggtctgtaacgtctgacggaccaccagttggttgatgcgattggtctcgaggccggccagctccttcaagtgttctggcgctttgacgccggcggcccataccaccaattcggcggcgatgatgcgaccatcagccaactgcacgccctgcggcagtacctccgcaaccctcgacgaagtatgcagctcgacgccgagctttctcagcagcacttcggtcgctgccgacaggcgtgccggcagggctggcaatacccggtcggcggcctcgattagattaagccggatatccttctccggatcgatgcggtcgagtccatatgcgaccagagcgcgggtggtgcggtgcagttcggcggccagttctacgtcagtggcgccggcgccgatgatggcgacctgcagctggtgaggctccagcggagcgggctgggcatgcgctcggatacatgcgttgactagccgctggttgaagcgtctcgcgtcggccggggattcgagcttgagcgcgttctcactgacccccggcgtgccgaagtcattgctctggctgccgaccgcaatcaccagcgtgtcataacggaagcgtcgttggggggtcacctgatggccttcgtcatcgatgaaggcggcgacttccacttcctgtcgctcccggtcgaggccgatcatctcgccgacacggtaagtgaaatggtgccagtgcgactgggccaagaattcgacctcgtgcacgttcatgtccatgctgccggcagcgatctcgtggagcttgggcttccagatatgcgaacgcgtcttgtcgatcagcgtgaccgcggcaaggccgcgcttgccgagcttgttgccgagcgcagtcgccagttccaagccgcctgcaccgccgccgacgataacgatctgatgttgcgaatccgcaggaacggagtcgcgtcgtccgcggaactggtgcagcaactcgtggggggaggaaatgactttcatgtgctctgtaagcagtgaatgcgtattggaatcaacgaagctatgagctcggcgtggtgtcgagatccggttgaatttcagggccaacgatcccgagtacgtcctgtgcgaaatcctgcggctggcgctaataatcccggcatctagtgcggctgctgggcgctggcttcgggcgggaacacgcaccacgatccgtcatcgtgctgaaagaagaaaatggcaagcgggcctgtcggcctccatgtctcgacgcacacatagcgcctttgatgtaagcgcgtgcgactgaaacgggtaatgcgaaccggcgtggcgggattcggtgcaaaccatttgtccacgagggaacgtaaggacttttcagcgaggttcatctacttctccttcagccacattttccgttgatggccaccgttccgccgcaaagcggcagggcgctgtcgtgtccagcactgcgttgagatcctcatggacgcgacgacaggcgtccgtctgcactgcgtcgaagtagtggttcgagtgcagttggcgctccagatttatcgacacgaaagccgcatgtgcagaaacaccggttaggcattccgaccggcgcccagattgcactttgcagctcgcacagcgggtaagcatctacacttaataacttatccttttaggatctctgtaagactttttgagcgaatttcggcgcttgtggcctgtaataattgctattactaaccttactgaaagtaatgtcacatagcggcatacttgcattcgggctggcaaaagaacgatttgaccaggctcggcaatttctggatgcgacgcaaagcgccgagcgccagtttcttcatgtcgttcttgtcctgcaccagtcgcttcgatacctgtcgtttcacgtgcgcccagacctgctcatctggattcaggtgcggcgagtacggcggtaagtagaacagcttgagctgccccttcaggctcgcgatatacgccttgaccagcttggccttgtggatcggatgcccgtccacgaccacgaagaccggcttatcggcaccaaccatcagccgctggaggaactcgcaaaataccgtgccagttaccgcaccgtcatgcagcatgaagcggaattcgccttgcgggcttacagccgagatcatgttcagcgaaaaacgccgcccggtcgcctcgaccaccggggtctggccgcgcggcgcccaggtcgtcccggtgtggtaatcggagcggattcccgattcgtcggcgaagtagatcctggctcccacttcgcgcgcttcggcgcggatcgcaggatagatctccgcctcccagcggcgcaccagcatggcatcctgctgccacgcctgatacagcggcttctgcgcactgaaacccagcaacttcatgacccggctcaccgccgagagcgacagctccttgccaaactgccgatggatcagtgcacggatcagcgacagtgtccacagcccaaactcgaacttgtattgctgcggtgtgttgtctcgcaccgcttgggcaagccagcgcatctcgtcgccgctgactttggacggacgccccgggatcggtttggcgagcagcgcacgctggccaccgctagcataatcggcaagccacctgaagacgcttcgcacattcacgcccagcgccgccgccacgctttgcgccgtttgaccctcacgaactgctttgatcgcctgttggcgcatcacctgaagggcatgatgatcgatcgctcgaccgtccgagttccgtttgcatttcattcccgtattgtctcatgacatgacaatactttcgagaaggttagtaagacagattctgaaaagcccgacgaccgcgagagccggctaccagaatgccgctagaagccacgtttggcgcgagagaatcgcctgtccgcatacgcctagcagcgggcggttcccgattgtgcagcgccagccgggcgccatgcctccctgcacttggagcagccatagcacccgagccgatcccatgtaccacgccaccgccccttgcctcctcgctatgcggcaccgccgaaatgctgcaagccaagctgtccatgctactccgccagtgcgttgcacggccgggcacgctaccggtgacagatgccgacaaggcacctgccatgagcgcaccccagctgcggaccacactctcggtgattccagcatgagcaaggggccggatggcatgttcgctgactacgtctcgcttaccggtaccactgcgctaactgctccatcgcaatcggtttgatcttcgaggcctgtccggcgcagccgaaggcctcgaagcgcagcttcaccacgctcctcgcccctttcttggccgccagcagcgccttgcgcgggtcgaactcgctgcgatcctccgccagtgacttgcggatagccccggtcatggcgaggcggatatcggtgtcgatattcaccttgcgcaccccggtcttgatgccgcgcaggatctcctcgaccggcacgccgtaggtctccttgatgtcgccgccgtactgccggatgatttccagccactcctgcggcaccgagctggagccgtgcatgaccaggtgcgtgtcgggaatctgctcgtggatttcgcggatgcggtcgatcgccaggatgtcgccggtgggcttgcgcgagaacttgtaggcgccgtggctggtgccgatggcaatcgccagcgcgtctaccccggtgcgggcgacgaagtcgcgcgcctgtgccgggtcggtcagcatcatgtcgtgcgacagcgtgcccgccgcgcccacgccgtcctcttcgccggcctggccggtttcgagcgagcccaggcagcccagttcaccctccaccgagacgccgactgcatgcgccatctcgcacacgcgccgcgtgacgtcgacgttgtagtcgtagtcggacggtgtcttcatgtcttcacgcagcgaaccgtccatcatcacgctggtaaagccggagcggatcgaggcctggcacacggccgggctggagccgtggtcctggtgcaacacgatggggatgtccggatgggtctcggccgcggccagcaccatatggcgcaggtaggcctcgccggcatacttgcgggcaccggcggaggcctggaggatgaccgggctgtcggtttcctcggccgcttccatgatggcgtgaatctgttccaggttgttgacgttgaaagccggcacgccgtagccgaactctcccgcgtggtccagcaactggcgcaaggatatgagtgccatgatgaagctcctttagtcgatgtggattcggtgaattgggttcagctggcggcccgttgctccagcacgtccagtgcgggcagcttcttgccttccaggaattccaggaacgcgccgccgccggtcgagatgtagcccacgcggtcggcaatgccgtacttggcgatggcggccagcgtgtcgccgccgccggcgatcgagaacgccttcgactcggcgatggcctgtgccagcaccctggtgccattgccgaactggtcgaattcgaacacgccaaccgggccattccagacgatggtgccggcggccttgagctggtcggccagcatggccgcggtcttcgggccgatgtcgagaatcatgtcgtcgtcggccacgtccctgacgtccttgaccgcggccgcggcggtggcgctgaactccttggcgcacaccacgtcgaccgggatcggcaccgaggcgccgcgggcggccatgatgtcgatgatggccctggcatcggccagcaggtcaggctcggccagcgacttgccgatcttcaggccggcggccagcatgaaggtattggcgatgccgccgccgacgaccaggttgtcgaccttgtcggccagcgacttcaggatggtcagcttggtcgagaccttggagccggccacgatcgccaccagcggacgcgccggctggcccagcgccttgcccaacgcgtcgatctcggcggccagaagcgggccggcgcaggcaacgggggcgtacctggcgatgccatgcgtggtcgcctcggcgcggtgggcggtgccgaaggcgtcgttgacgtagacatcgcacagcgccgccatcttctgcgccagctcgtcgctgttcttcttttcgcccgtgttcatgcggcagttttccagcagcaccacctgcccgggcggcacctggaagccgccctcggtccagccggacaacagcggcacctggcggcccagcagttccgacaggcggcggcccaccggcgccaggctgtggcgcgggtcgggcgccccctcctgcggccggcccaggtgcgaggtgaccatcaccgcagcgcccgcctgcaggcaggccgcgatggcaggcacggaagcacggatgcgggtatcgtcggtgatatcgcccgctgcatcctgcgggacgttgaggtcggcgcggataaagacacgcttgccggccagcccgccagcggcgagcagtgcggccagcgtgtgcggcgccgtgggattcgtgtgcgggaccgatgcatgggataggctcatcatggcaacctgctagcgtgcgtgggccagtgccaccgcggtatccagcatgcggttggagaagccccattcgttgtcataccaggccgacaccttgaccagcgtgccgttgaccttggtcagggtggcgtcgaaagtggatgaggccgggttgtggttgaagtccaccgagaccagcggcgcggtgttgtagtccaggatgcccttgagctcgccttcggcggctgccttcaggatgccgttcacttcctcaacggtggtcggccgcgccgccacgaaggacaggtcgaccagcgacacattgatcgtcggcacgcgcacggcaaagccgtccagccggccgtccagctcaggcatcaccagcccgaccgcggcggcggcgccggtcttggtcgggatcatcgacatggtggccgagcgcgcccggcgcaggtcttcgtggtagacgtcggtcagcacctggtcattggtataggaatgcaccgtggtcatcaggccgttcaccacgcccagcttctcgtgcagtggcttgaccagcggtgccaggcagttggtggtgcacgaggcgttggagatcaccgtgtcggtcgccttcagcacgccgtggttgacgccatagacgatggtggcgtccacgtccttgccgccgggggcggagatgatcaccttcttcgcgccgcccttcagatgggccgaggccttctccttgctggtgaagagcccggtgcattccatcaccacgtccacgcccagttcgccccacggcagctcggccgggttgcgctgtgccagcacgcggatccggtccccgttgacgcggaaggcatcgccgtcgaccgagacctcgcccgggaagcggccgtggacggtgtcgtactgggtcaggtgggcgttggtggccgcgttgccgagatcgttgatggcgacgatctcgagatcgtgccgcttgccgccttcatagtgggcgcgcagcacattgcggccgatgcgtccgtagccgttgatggcaaccttgatagtcatgctgtctcctttacttgtcttggtatccttgccggtcgcgcctgcgcgccggcgcaatatcaggcggcgggcgccagccgcgccggcgtcagcagcgccggcaacgcctccagcgaatcgaccagcgcgtccgcgcccagcgccgcgggcccgccggggccggcgtagccatagcgcaccaggcagaccgggatgccggccgcgcgcgccgccgccacgtccacggccgaatcccccaccagcacaccctgcgccgcatcgacgtcgagcagattgcaggcatgccgcagcggctcggggtcgggcttcatctgcgcgatcgagtcgcccgccaccagcacttccaggtactgcgacaacccggtcagcgccagcagcggcaccgccagcgcgcgcggcttgttggtgacgcaggcaagccggtagccttgccgcctgagcgcggccagtccggcctccacgcccgggaacacggagccgaggcggccgttggtgtcggcatagtggcgatggaacatcgccacggcatcggtagcgtccacccttggcgcgagctgcgcggtctccagcacacgccgcaccaggttcggcacgccacggccgatgaagccggccacggtgccgaatggtagtgccgggctgccgaggtcggccagcatgcggttggcggcctcgacaatgtcgggcgcgcagtcgaccagcgtgccgtccaggtcgatcaacaccgcggtgcagggcagggatacggtagccatcaagcgtcctccagcagcacgcgcgcggcggccgcgacatgcgccggggtcaggccaaagtgctggtacagcgcctcggccggcgcggattcgccgaagctgtcgatgcccagcgccaggccctgctcgcccaccacgccccgccagtaccaggtggcgccggcctccacgctgatgcgcggcaagcctggcggcagcacgctgtcgcggtacgccgcgtcctgcgcgtagaacagctcgacgcagggcatggacaccacgcgcgcggcgatgccggcatcggccaggtccagcgccgcgcgcgcggcgatttccacctcggagccagtggcgatcagcaccacgcgcggcgccggcacatcgcgcagcacatagccgccacgcgcgatatccgcacgctgggccgcatcgcgctcgaacggcatcagcgcctgccgcgacagcaccaggcaggtcgggccattctcacgctgcagcgcggccagccacgcatacgcggtctcggcgccgtcgcaggggcgccagacctggttgttggggatcagccgcaggctggcggcgtgttccactggctggtgggtgggaccgtcctcgccaagtccgatcgagtcatgggtcagcacgtgcaccacgcgcaggcgcatcagcgccgccatgcggatggcattgcgcgaatagtccgagaacgtcatgaaggtgccgccgtaggggatcaggccgccatgcagcgcaatgccgttcatgacggcggccatgccgaactcgcgcacgccgtagctcacatagttgccatgcccggcatggttgacccagaccgacgccttgacattggtcaggttggacccggtcaggtcggccgagccgcccagcagctcgggcaaggcgggcgtgagcgcctccaggcacagctgcgatgccttgcgcgtggcgatcttgccttgcagcggcgacggcgcgtccagcaacgccatcaattcggcatcgaagccctcgggcaggcggccattggcacggcgcacgaattcttcggccagttcggggtgcgcggcgcaatagctgacgaagcgcgcctcccattcggcctcgcgcgcggcgccttgcgcgcgtgcatcccaggcgtcggcgacatccgccggcaccgtgaagggctcggcttcccagcccagcgcggtgcgcatggcggcgatctccggcgcgcccagcggggcgccgtgcacatcgtgcccgccggccttggcgggcgcgcccttgccgatcacggtgcggcagcagatcagcgtgggccggtcgcgctcggccttggcctcgtgcagcgcggcatcgagggcgtgcgcatcgtgtccgtcgacgtccgcaatcacatgccagccataggcggcaaagcgcttcggggtgtcgtcggcaaaccagccggcgacctcgccgtcgatggagataccgttgtcgtcgtacaggcagatcagcttgcccagcccgagcgtacccgccagcgagcaggcctcgtggctgagcccttccatcaggcagccatcgccgaggaagacataggtgtggtggtcgacgatgtcgaagccggggcggttgaaggtggcggccagcagcttctccgccagcgccatgccgacggcattggcgaggccctgacccagcggcccggtggtggtttccacacccggcgtcacgtcgacttccggatgccccggcgtgaccgcgtgcaactggcggaactggcgcagctgcgacatcggcaggtcgtagccggtgagatgcagcagcgcgtactgcagcatggaggcatggccgttggacagcacgaagcggtcacggtcgggccaggccgggttggccgggttgtggcgcaggtggcgccgccacacgacctcggccatctcggccatgcccatgggggcgccggggtggccggagcgggccaactccaccgcgtcggcggccaggaagcgcagcgcgttggcgcaacgcgctgcggggtcgatgcgttcgggtgcgttcatctcggctccttacagcgcggcgcgcttgcggcgctccatcatgcgcagcacgaagggcgtgaagatcagctgcatggccagttccatcttgccgcccggcaccacgatggtgttggcgcgcgacatgaaggagtcgtggatcatgctcagcaggtactggaagtcgatccccttcgggttggcaaagcggatcaccaccatgctttcatcgggcgcggggatttcgcgcgagataaaggggttggacgtgtccacgcacggcacccgctggaagttcacatgcgtgcgcgagaactgcgggcagatgtagttcacgtagtccggcatgcggcgcaggatggtgtcggtcacggcctcggtcgagtagccgcgctgtttcttgtcgcgccagagcttctgaatccactccaggttgatgacgggcaccacgccgatcagcaggttgggatactgggcgacattgacctcgtcggtgaccacgccgccgtgcaggccttcgtagaacagcaggtcggtatcggccggcaatggctcccacgcggtgaaggtgccgggctgctgcccgaacggcgcggcctcctccgtgctgtgcagatagcgccggcgcatgcccgtgccggattccgcgtaggagcggaacaggctctccaggtcgccgaacaggttgttctccgcgccgaagtggctgaagttcatattgccggtgcgttcggcctcggccatcttgaccttcatctcggcacggtcgtagcggtggaagctgtcgccttcgatcacgaccgacttcacgccttcacggcagaagatgttctcgaaggtacgggtcaccgacgtggtaccggcgcccgaggacccggtgatagcgataatgggataacgttctgacatggccaggcacctcaggcggacgcgcggaacaggctgcgctcgttgaacaggggactcggaaggtcggggtcggtctggttggtgtggtagccctcgatccgttccacttcattgcgcgagccgaagatcacgccgatacgctggtgcagcgcgcccggcgccaccgacatcagcgtctgccggcccgtgctggcgcgcccgccggcctgctccatcaggaaggcgatcgggttggcctcgtacagcaggcgaaggcggcccggcttggcgggatccttggtgtcgcgcgggtacatgaagacaccgccgcgcatcaggatgcggtgcgcctcggccaccatcgatgcgatccagcgcatattgaaatccttgccgcgcggcccgctcttgccagccatgcactcgccgatgtagcgctgcaccggcgcttcccagaagcggctgttcgacgcgttgatggcaaattcctgggtatcgggcggcacccgcaggtgggggtgcgtcaggaagaactcgcccaggttgggatcgagcgtgaagccgttgacgccattgcccacggtcagcaccagcatggtggtgggaccgtagagcgcgtagccggccgccacctgggcgctgccgggctgcaggaaatcctgctcggtgacggtgtcggcgccttcgggcgcgcgcagcaccgagaagatgctgcccactgagacattgacgtcgatgttggacgagccgtcgagcggatcgaacaccagcaggtacttgccgcgcgggtagttctccgggatctggtaaggcgcctccatctcctccgacgccatgccggccaggtagccgccccactcgttgacgcgcaggaaagtggtattgctcagcacgtccagcttctgctggatctcgccttgcacgttgacggccccctcttctccagcttgagtgctggccttgccgtgcaagccccccagcgcgccgaaggcaaccgcgcgcgcaatttccttgcaggccatggcgacgttgagaatcaggccgttgaagccaccgctggcgtccggatagcggcggcgttcctcgatcaggaactgcgtcagggtcatccgctggacttcgggcatgacaggtctcctatagattggctatgtattcttgtgtggtgccgtgcgggctacgtgatggtggcggcctcgcgcaagcggtgcaggatgccccggtagccgccgtcggcatccggcgcgccgaacacggcgctgccggccacgaaggtgtcggcgcccgcacgggcgatctcagtgatgttgtcggccttgacgccgccgtcgatctccagccagaccggccgcccgccggcggccacttgccggtcgatgcgcgcccgtgcctggcgcaccttgtccagcacgcccggaatgaaggcctggccgccgaagcccgggttcacgctcatcagcagcaccaggtcgagcttgtccagcgtgtggtccagccagctcagcggcgtggccgggttcagcaccaggccggccttgcagccgtggtcgcggatcaggccgatggtgcggtccacatggcggctcgcttccggatggaagctgatgaggttggcgccggccttggcgaacatcgggatcagcgcatcgaccggctccaccatcaggtgcacgtcgatggggatcgaaaccagcggccggattgcctcgcacaccagcgggccgatggtcaggttggacacatagtggttgtccatcacatcgaagtgcaccaggtccgcgccgccggcctcgatcgcgcacacctcttcgcccaggcgcgcgaaatcggccgacaggatggatggcgccaggcggatggcgcgctggctgccatggccggtgttgggttcggtggcatgcatgtcaggtcgcctcgatcagggtgccgtggtgccaggcgcgcaacgcggcaaggtcggcccagcggtgtgccgcgccgggcacgtgctggggcatgggttcggcgggatcgccaagatgcggcagcaccagcagcgcgccctcgaaggaatcctgcgcgctgaaggtggtgggcgtgacaacggtgggaatgccggccgcccgggcggcgcgcaatccgttccccgagtcctcgatggccaggcaatcgccggcctccaggccgagccgctccagcacggccaggtaaacatcgggcgcaggcttcttgatcgcggtggtgccggcgtcgcagatggcagcaaagcgcccgcgccagtccgcgccaaggtgcgcctgcagcagcgcgtcaaggttggccggcgtggtggtggtggcaatcgcgagcgggaggccggcctcgccggcctctgcgatcaggcgggcaatgcccgggcgcagcggcaggccgcccgccccaacgcgctcggcgtagtggcgggtcttgatggcgtgcacggcgtcgatggtttccttcaccttgcagccgcgggcctcttccgggtcgaccatgcgccagtaatgcatcaggcgctccttgccgccggcgaccttgagcaggcgcgtgtagagcggcgcgtcccagtgccagtccaggccgacctcggcgaaggcggcattgaaggcttgcaggtgagcggtttcggtatcggcgagcgtgccgtcgacatcgaagatcagggcttgcatggcttactccttggccggcgtctgtgcggctggcgcggccttcgaaaacacgcggctggccagcaggtcagacgccgtgatggtggtcagggtacggtcgtcggcgaccgtgccggcatcgtccagcaggcgcgaggcatggcgcagccgcgcgcggtccagcgcattgcgcacgctgcgggcattggcaaagtgcggctgcgccatgcgccgggccaggtaatccgcaaacacggcccggctttcgtcgtcaaagcggtactgcatctcggccagcatcaggtcggcgatctgacgcagctcgtcgagctggtagtcagggaaatcgacatggtgggcaacgcgcgaggacatgcccgggttggactcgaagaagcggtccatgcggtccttgtagccggccaggatcaccaccaggtcatcgcggttgttctccatcacctgcagcaggatctcgatggcctcctggccgtagtcgcgctcgttctccgggcggtagaggtagtaggcctcgtcgatgaagagcaccccgcccaaggccttcttcaggatctccttggtcttgggcgcggtatggccgatgtactggccgaccaggtcgtcgcgggtcaccgccaccaggtggccgcgccgcacgtagccaagctggtgcaggatctgcgccatgcgcatagccacggtggtcttgccagtgccgggattaccggtgaagcacatatgcaggctgggcgcaccggcgctgaagccgcgcgcggcgcgcagcttgtccaccagcagcaaggcggcaatatcgcgaatgcgcgctttcaccggcttcagtccgatcagttcacggtcgagctgggccagcagctcggtgatgcccgagctggccagcgattcggccagcgatccaggcagcgatgcggcctgggcagctggtggctgcagcggtgcggtcgtttcgggtgcggacatggcaggctccgtgaggatcgttcacctcgataaattcgaggcgcagctccccccggacgcgcagcctggcggcggcgcaaccgtgggatggcacagtcaggaaatcgccggcggcagcgtcgtggcagcgccgcgcggcggttcagccggtgccgctcagtagcggctgccctcggggcgcgcctgcacggcgtagctctcgatcgaatagcggatcgtgcggccgggctcttcctggcgcaccaggcggaagccgggctcgtcggccggacgattcacgatgaacgacatcaccaccgactccaccgtatgcgtcgaatcgaaggccgtgacgcggatgtagtggttggggaaggtgctgcgcgcgttgttgatctccagcaggatgccggcggcatcgcgcaggtcgaacatcggcaggccgaacatctcccagtaggtattgcgcggatgcgggtcgtcggtgtactcgatgccgaccgcccagccctggttcaggcagtattcaagctggctggtgatctgcgcgtcggtgaggtcgggcaggaaagagaaagtgccttgagtaatacgcatgatgtcctctcgttctttgggttcgctcgtcgtgccttggtggcgtcgcgccagggctcaggccaccgacgcggtgggcgcgaagtccgaggtgtcggtcggcgtgtagttgaagctgatatcgccccaggtatcgagcgcagcccgcagcggtccgcaccagcgcgcggcatcgcgcaggatctccggcccttcattgaggatgtcgcggccttcgttgcgcgccagcaccatcgcttccagcgccacgcggttggccgtagcacccgcctggatcccttgcgggtggccgatggtgccgccgccgaactgcagcaccacgtcgtcgccaaagaggtggatcagctggtgcatctggccggcatggatgccgccggaggccaccggcatcaccttgcgcagcgaagcccagtcctggtcgaagaacagcccgcgcgtcaggtcggtatgggtgtacgcatcgcggcagacgttgtagtagccctgcacggtcagcggatcgccttccagcttgcccaccgcggtgccggtgtgcatgtggtcgacgccggccaggcgcagccatttggcgatcacgcggaaggacacgccgtggttcttctgccgggtgtaggtgccatggcccgcgcggtgcaggtgcaggatcatgtcgttctggcggcaccagttgctcatggactggatacaggtccagcccacgatcaggtcgatcatgatgacgaccgagcccagcgacttggcgaactcggcgcgccggtacatctcttccatggtgccggcggtcacgttgaggtagctgcccttgacctcgccggtggcggccgaagccttgttgacggcgtccatcacgaacaggaagcggtcgcgccagtgcatgaagggctgcgagttgatgttctcgtcgtccttcatgaaatccagcccgcccttcaggccctcatacaccacgcggccgtagttgcggcccgacagtcccagcttgggcttggtggtcgcgcccagcagcgggcggccgaacttgtcgaggcgctcgcgctcgacgatgatgcccgtggaggggccggcgaaggtcttcacataggccaccgggaagcgcatgtcttccaggcgcgcggccttgatcggcttgaagctgaagacgttgccgatgatcgacgcggtcaggttggcgatcgagccttcctcgaacagcgacaggtcataggccacgtagcagaagaactgctcggggttgttgggcaccggatcgacccggtaggccttggcgcggtacatgtcgcaggcggtcaggcggtcggtccacaccaccgtccaggtggcggtggaggattcgccggccaccgcggcagcggcctcgaccggatccacgccgtcttgcggcgtgatgcggaacagcgccagcaggtcggtatccttgggctcgtagtcgccgtcccagtaccccatttccttgtacttcatgacgccggcgtcatagcgcttgcgcggcttggcttggaccgattcaggtgcgttcatgcttgtctccttgcgtggttgagcgtcgtggctgctgcgttgatgcaaagatataagcccactaacataaggtaaattcagatattcttagacaccgtataagcaatcccttaagtgcgacccagactgcacatcacggaaccattcaaaagccgcccccactgctcatgtccttcctgcgcgccctcacccttcgccagttgctagcttcgtgcgcgccgccgaggaactgcacctgacccagccagcggtctcgatgcaggtcaagcagctcgaatccgtggtcggcctggcgctgttcgaacgggtcaagggacagttcacgctgcgcccggcgaccgcctgctgccaccatgcgtcccggatcctcggcgaggtcaaggacgccgaggaatgcctgcaggccgtcaaggacgtcagcaggggtcgatcacgatcgggctgatcagcacgtcgaaatacttcgcgcccaagctgctcgcgcggtatacggaacgctatccgggcgtggatgtccgcttcgccgaaggcaaccgcgaaacgctactgcgcctgctgcaggacaacgcgatcgacctcgccctgatgggccggccgccgcgcaaactcgacgccgtgtccgaacccatcgcctcgcatccgcacgtgctagtggcttcgccgcggcatccgctgcgtgacgctgagcgcttcgatctgcaagaactacgccacgaaaccttcctgctgcgcgagccgcattctggcactcgctcggtggccgaggagatgttcgggcaccacctctttgcaccggccaaagtgcccatgctggatagcaatgaaacgatcaagtaagcggtgatggccggcatgggcatcagcctgttatcactgcacacgctgtcgctggaattgcacacaccgggagatcgcgctgctcgatgcggcaggcacgccaattgagcgtgtctggcatgtcgtgcacatggctagcaagcggctgtcgcccgccagcgagctatgtcgcaccttcctgctggaacacacggcggaatatttggaacgggaatacggcgggctgctgcccggcgggcttgtggcctaggggattcggcaagtcggggatcctggtagatggcgtcggcctgcgcatgtgtcatggcgccggtggcgagataagcatccggcaccacggcagttgggcttgcgggctggtctgcagtagctgcgtggcattgctcggacgacagacccgctcctgccgcgcatgcagcaggggtacaggaaggctgcgagcagcgccggctcattgcctttccgttgggcggggcgagacgccgggggcgggggctcatccgagttcaacgccgatcactgaacttccttctgatgcattcaagcgaaaacccagtgagcatctggcgtcggctagcgccaggcgacggtccacttcatgacggatgaaatattgtcaaatcaggatccggtgtcctgcgttgtaggttcgccgaatagggcgctgtcgggcggacgcacgaacctgcgtcacagatgctcatacatgccttctcggtatcaatctttttctaaacaagccatccaactcaggatggtagcgggggttttccccaggtcttcggattcaggcatagatcttgtttcaactatgtcgccaagccagcattcgtgcgcgagggcggtatcgctccccggttggcgcatcgcgacgaatgccaataccaatacagaaattaggagacaggttatggtcgaaacattttatgaagtcatgcgcaggcagggcatttcgcgacgaagtttcctgaagtactgttccctgacagccacatccttaggactgggaccttcctttctgccgcagatcgcgcacgcgatggaaaccaagccgcgtacaccagtactttggctgcacggtctcgaatgtacctgttgctcggaatcgttcattcgctcggcccatccgctggcaaaggacgtcgtgctatcgatgatctcactggactatgacgacacactgatggcggctgccggccaccaggccgaggccatcctcgaggagatcatgacgaagtacaagggcaactatattctggcggtggaggggaatccgccactcaatcaggatggcatgagctgcatcatcggtgggcggccattcattgagcagctcaaatacgtggccaaggatgccaaggccattatctcctggggttcctgcgcatcctggggatgcgtgcaggcagccaaacctaatcccactcaggccacaccggttcacaaggtgatcaccgacaagccgattatcaaggtcccggggtgccctccgattgccgaagtgatgacgggtgtcattacctacatgctcaccttcgatcgtattcccgaactggatcgacagggtcggccgaagatgttctatagccagcgcatccacgacaaatgctaccggcgtccacacttcgatgccggccagttcgtcgaggaatgggacgacgaatcagcccgcaaaggcttctgcttatacaagatgggctgtaaaggcccgaccacgtacaacgcctgctccaccacgcgctggaacgaggggacgagtttccccattcagtcgggccacggttgcattggttgctccgaggatggcttttgggacaaaggctcattctacgatcgtctgaccggcatcagccagttcggcgttgaggccaacgccgacaagattggcggaacggcctccgtcgtggtgggggcggccgtgacggcgcatgccgcagcgtctgcgatcaagcgtgcgtcgaagaagaacgaaaccagcggcagtgaacactaagccgccggggaaacgactgaatcaggaagatcgaaataatgtcagcttacgcaacccaaggcttcaatcttgacgaccgcggccgtcgcattgtcgtcgatcccgtcacccgcatcgagggtcatatgcgctgcgaggtgaatgtcgatgccaacaatgtcattcgcaacgctgtttccactggtaccatgtggcgcggactggaagtgattctcaagggccgcgatccgcgcgacgcctgggcgttcgtagaacgcatctgcggtgtttgtaccggttgtcacgcgcttgcgtcggtgcgtgccgtggaaaacgcgctcgacatcagaattccggctcttttgaaaaatgagtgggttatgcggcatgcgggttgatcgcggagaagtcgagctttccggcgatcaggaagatcacggtgcgcatggttttgaagctcacataaccgcgggccttgcgcttggcggcttggaacaggccgttgagcgcctccaggaagccattggtctggcgcgtctgggtccatgcaacgataccgtcgaaatgcttgcggatcatgcgcgcgacctccttcattggctcgaccttggatcgcatgacgttcgtgcaccactgctcgagcattgcggaaacaacgttgatctgcttgcgctcaaggatttcgcgcaactgctcgcgatacagccaggcacgggcagtgcgtttggtcgtgacgttggcgatcaacgcgtcgagatcggcacgctgcgcggctggcaacccgtcgcgatccttgagcagcgtccagcgcaggcctttgaggcttggatcggtcttctgttcgatacgccgggtcttgtccacggctgcagaagcgtgagccacgacatggaacttgtcgaaggtgatgcgcgcgttgggcaaatgctcgctgacgcccttgatgaacgccggcgacatgtcgatactgaccaccccgatctgctcaggcgcagcgttgttctcgcgcagatgtgcagcgaacttgccaaccgtggcagcatccttgccttcggtcacaaacacgaccttacgcgcgtcggcatcagcgacaagcgtcaggtagttgtgaccgcgcctgtaggacgtttcgtcaacggcggcagcggtcacgccggccagatcgagttcggccaccgcgaggtcgacatagcgctcgcagatagcgtacacgcgatgccacgactcacccaccgttctggctacagcagaaaacggcatctgctgcgcaagcgccaccaccatggcttcaaacagcaacgtgaagccagagagcttgccagcccagtccggctcgaccaacaccacgcggccgtcgggaagcttcacgcgtggcgtgcggacttccagatagcagtcgtgctcgaagaagttcaggtgccgatagcgtttggtcaccgtgtcgtgaaccgggtgcccaccggcgacctccgggtgggaaaagcggctgccggcgacaaagtcaatctggatcgtcaacgtcttggtttgcgcgttgaagtcgacttcccggacgaaccacggatcgcttatgccaagggctgcttcaaacagtttgctatgcatcgctcttgttgctctttacctgaaacccgccacgataccacccacttgaaattcaaaagaggcagaattccaaagaacgcccatctgatccgagagatcatggccaagacgttgcaggtgcatgaccatgcggtgcatttctatcacctgcatgcgctggattgggtggatgtcatgtcagccctgaaagccgacccgaagaggacttccgagttgcagcagttagtttcgcctgcgcatccgctgtcctcggcaggctatttccgcgatattcaaaatcgactcaagcgctttgtcgagagtggtcagcttggccctttcatgaatgggtactggggatccaaggcttatgtgctgccgccggaggccaatctgatggcggtcacgcattatttggaagcgctggacctacagaaggagtgggtgaaaatccacaccatcttcggcggcaagaatccgcacccgaactacttggtcggtggcgtgccgtgcgcgatcaatctcgatggtatcggggctgccagcgcgccggtaaatatggagcgcttgagcttcgttaaggcgcgcatcgacgagatcatcgaattcaataagaatgtatacgtgccagacgtgctcgccatcggcacactgtataaacaggccgggtggctgtacggcggcgggctggcagccaccaacgtgcttgactacggcgagtacccgaacgttgcctacaacaagagcactgaccaactgcccggcggcgcgatcctcaacggcaactgggacgaagtatttccagtggatccgcgcgactcccaacaggtgcaggaattcgtgtcgcacagctggtacaagtatgccgacgagagcgtaggtctgcatccctgggacggcgtgactgagcccaattacgtgctcggtgcaaacactaagggtacacgcacgcgcatcgagcaaatcgacgagagcgcgaagtactcgtggattaaatcgccgcgctggcgcggccacgcgatggaggtagggccgctgtcgcgctacatccttgcctatgcccatgcgcggagcggcaacaagtacgctgagcgtcccaaggagcagcttgagtactccgcgcagatgatcaacagtgcgataccaaaggcattgggattgccagaaacacaatacacgctcaagcagttgttgcccagcacgatcggtcgtacgctggcgcgcgcactcgagagccaatattgcggagaaatgatgcatagcgactggcatgatctggtcgccaacatccgggcgggcgatacggcaaccgccaacgttgacaagtgggatcctgccacctggccgctgcaagccaagggcgttgggaccgtcgctgcgccgcgcggcgctctcggacactggattcgtatcaaggacggccggatcgagaactatcagtgcgtagtgcctaccacgtggaatggcagtccgcgtgattacaaggggcagatcggcgcatttgaggcttcgctgatgaacaccccgatggtcaacccggagcagccggtggaaatcttgcgcacgctgcattcgttcgatccctgtctggcgtgttcgactcacgtcatgagcgcggaaggccaggaactcactacagtcaaggtgcgataaaaggtgccggaccggcgtctggccagcgagcggatatcggttcggcaacggcacaaggagatagcatgagcacaaaaatgcaggcggatcgcattgcagatgcgaccgggaccgacgaaggagcggtagccagcgggaagtcaatcaaggccacttatgtttatgaggcgccagtgaggctgtggcactgggtcaatgcgctggcgatcgtagtgctggcagtgaccggattttttatcggctcgccgcccgcgaccaggccgggggaggccagcgcaaactttctgatgggctatattcgctttgcccactttgtcgcagcttacatattcgcgatcggcatgctgggccgcatctactgggcgacggcagggaatcatcattcccgcgaactcttctccgtgccggtgttcactcgggcgtactggcaggaggtgatttcgatgctgcgttggtacgccttcctatctgcgcgtccaagccggtatgtcggtcacaatccgctggcccgtttcgcgatgttcttcatcttcttcctgagttcggtgttcatgatcctcacgggcttcgcgatgtacggcgaaggcgcacagatgggctcgtggcaggagcgcatgttcggctgggtcattcctttgctcggtcaatctcaggatgtgcatacctggcatcatttgggtatgtggttcattgtggtgtttgtgatcgtccatgtctatgcagcgattcgcgaggacatcatgggccgccagagcgtagtgagcacgatggtctcgggctatcggacctttaaggactgatgcgcaatgcaaccgaagcgatcgcaggctttcgtcgataccatgcacccgctaccggaggtattgccctcggtatggtggcatcccggcgtgtcacggcgcgtgtcggttcattcgggctgttttctgagtagtcattacctcaagccgctcggcctgtcgcagccccacgcccgctgtctgctcaggattgcgaaacggcgcttgcatgaaatcatcaattggaacagccgtcaggcttggaaaggcgcctgttcctcctttcgtgtctcggtcgctcgccgcacggtacacggttccctttttcgctgaccaccgccatgagaccaactcaaacgtccgatatcgcacctggaaccagctgtaaccaatcccgtgacaaggagccggtggtagttgcaatgggcattggcaatgtgctctgggcggatgagggctttggcgtgcgctgcattgaaaccctccagcagcgctatcagttcgcaccgcaggtatgcctggtcgacgggggcacgcaggggctctatctgatccaccacgtgcaggctgcgtcgcgcctgctgatcttcgatgcgatcgactatggcctgcctccaggaacgctgagaattatcgaagacgaggcggtgccgaaattccttggggccaagaagatgagcctgcaccagaccggcttccaggaagtactgttgctcgcccagttgacgggacagtacccgcagcaggtggtgctgatcggctgtcagccggaggagttggaggattatggcggcagtctaaggcgggtgatgaaggctgcggtggaggatgcggtggagaaaggggcggacttgctgcggagatggggcgggatgccggtgcctcgcactgcggagcttgcgcctgccgaggccgtgaccgtgccgcatctggcgctcgatcgctacgaagccgaacgtccttcgcctcgggccgcctgccggattggcgatgaacgttttatgccacaggatttgtgaggggcgaatatgtgtattggcattcccatgcaggtcatggcgatcgagcctggatatgcggtctgtgcgggacgcggcgaacgacggagagtctcgagcgcgctggttggtgactgccagcagggcgactggctgctggtcttcctggattcggcgcgtgagcggatcgatgcgctcagggcgcatgaaatcgatgccacgctggatatgctgcaagcggccctgctgggtcttgacgcatccgaagcgcaaccacgttttgaactgccatcggcgatggcccgcgaggacctcgccgttctatccaactccagagattcttcctcttactaaggtaactttcatgtcgaccgaatcagcgatgtttcttgcccccatcccgacgacggacgcagtaccgccggtgatcgaacgtctggtcgaacagcatcaggctgcctgggttgaccaggattccattgacgactggctggctggcggcggcgattgcgtgctgtttatcgccggcgacccggtgcgctttcccgagtgcgtggatgtcgctgtcgtgttgccggagttgcaaagggtgttcttcaatggttttcgcattggcgtggcgaaacgtgaacgtgagcacgaagatgtgctggcgaatcgctttggcacgcagcgtcgaccgtcgctggtgttcttgcgagacggtgcctatgtgagcgtaatcgccggcatgcgcgactgggacgaatacgtgcgcgaggtccggcgggcgctcgcgatgccgacttcacggccgccatccatcggcattccagtgatttcggcggcagccggcggcagttgccactgatccgtcgaacaatgcctcacaggacaacgcgatgaattcatttcccattccggtcgtgctgctcggtcccggttcgcaagccgaggatgaaacgctcgattacatacacatgccgcagggcatgagtgtctatacaccgcctgtgctgccggaacccgagcagattgcctgcctgacccaagcgcaaagtgtgctgcgggcgattctcgacgcgctggaccgcgcggacccgaaacagcccaatccaagaatcgaattgtgggcattggacgaagaaaaccgtcaactgctcaagcaagtgcttggtgagggggaggtgagtgcaaggattgagggcgagtaccaggtgtatatccaggaagctgtatttgcaggggtgtggcgcgtggtgtccacttgccccgatgcgacgacggactacatcgaggttggcgcagcaccggaagtgctgcgcggcgcggcgcgttatggcgccaatcagtggagtctggatgtcgggcgggtgcccgacggtgtcatgaacgcgccctcgatcctggcggagatcgatgaccaattgctgagttggcatcccggcaagccggtgcatgtcgtcaacctgacattactgccgatgtcgccgcaagatattacgtttctcgacgaaactctcggtgctgcaagcgtcaccatcctttcgcgcggctatggcaactgtcgcattagcagcacggcagtgccatattgctggcgggtggtgtatttcaattcgcaggacaccaccattctcaacaccgtcgagattaccgatctgccggaagtggcctgcgcggccccggaagacctgcgggattctcacgaacgtctgacagaggtactgaaatgggtggggagcatatgaacgacgcaggtatggggcgcttcgaaggcagttacctgggagatcgggggcgcctggcggccgacgcgcggctggaatgcaagatctgctggtgggagtacgatcctgaagtcggcgatccagtttggcagattgcgcccggcacttcattttcggcgctcccggcgcactggcggtgtccgaattgcgacggtgaagccgagcaatttatggtgctcggtccgcaggcgtgagagactgcaacgatgttgctggccaactatggagcctgtgaagtggaccgggtgcgccatctggaagaggctttctgctgcattgcggcaactcgcatggccgatatccccgtggtgaaccgcgcgttgtcggtggaagcattggggttcgagcagtgtgccgaatcagcgggcggctcggatggcgaaatggggattctcattactccctggttcatgaacctgatttggctagcgccatacggcccatgcctcggagagcgggatgcgtcgacgctgccggtgggaaagacctgtatgcgacgatttggaagccacgacttcgaattcatcggtgcctcggagccacagtttggtccctaccaattttgctcattattttcgccgatgtttgaattcgccaaccaggctagtgcgcgcgcaaccgcgacggaagtattgcgtctgttacgggcgtcgccagatgcgcctttaccgccaacgtgcgccccgcaccgagacaggcgggggtttctgttcggtaggcgtcgaattgagggggaatcgttatgactcgggccgtcgcgttgaccggtcggctgacatttcgcccagggcaggtgccaggcattgcgggtgagcgcccccaactcgccgaacgattgctgcgaggccggcccggcgaggctgcaccgcacctcctgccgaggctctttgctctgtgcggcgaggcgcacggcgtcaccgcggcgctcgccgtgaacgctgcgcttggtcgtgtcgccgcgcccgaaccggcgctgtttcgaaggctcgcccatgagacggcatgtgagcatatccgccgcatctggctggactggccgctgcatctggccagcgggccggtgccgtccacgtttaatagtcgagtgccgcagcgcgaactgattgattgcccgatgttgaaggcgtcgcattcggagtcggccgccatgctcgcttggctggagagggcggtgctgggaaccgcaccccgccgctggctggcgcattggcatgaagacccggccggctgcctttccacatgggcgaccaagatccacacctggcctgcaatggcaatgcgtcagtgcatgcaggtagcgcaggccatggcgagcatgcctgcccccctgctgccgcacgcgtcaacggacgccttgcgcgaactggcgcagtccttggccggggaggcggactttccttgccgcccaagctggcaaggccgggtgttcgagactggcagttggacacgactggggctggcggattgcagcgccttcggcaacatgtggttgcggctgggcgcgcgcatcgcggagttggtgttgctgtcgctgcgggacggtatgcaggcatccggggaggcacatgattcaccttgtctgcaaatgggcgcattggcgctggctcccggccaggcgttggcatggagcgaaatggcccgtggcttgctgatgcactgggtacgtctggtggatacgccgcaaggaccggtgatcggcggctatcggatcattgcgccgactgaatggaacttccatccggacggggcggtggcgcacatgctcgcccacctcgcgccgttcgacgcggccgatgtgcggcgcagcatcggcattctggtcgcggcgtatgatccttgcgtcccctatacggtggagttcgcggagtctttgggagatactgtccatgcatgagctcagcctggcgggtggcatcttgcagttgctcgaagacgctgcgcggcgcgaacgatttgctcgggtcacgctcttgcgcctcgaggcaggcaagttgtgtggcgtggaggtacgcgcgctgcgtttcgcgctcgaggccattgcttcgggaacctgcctggagggcgcttgtatcgagatcgaggaacctgagggacaggcctggtgcctgcagtgcaatgcagcggttgctttggcggagcgtggcgcaccatgcagcggatgcggcggctaccggctccagcccactgcggggaccgagttgcgtgttatggacatgctggtcgaagatcactggtgtcctgaatgaaaaattcattgaatcaggacaccagggtgaagcgatctgcgagaagaaaggagtaggcgaaaatgtgcgtcatatgtggatgcaataccaatcacgagactgcccggcaagacgagaataagggcgaacatgctcccggccgtggcctcgtcgataccggcaccgagccgccgggcgcggcgcatgtacggatcgatgcgtccaccggtgatctgcactacggcgcggggccggcgcacgtgtctgtgccgggtctcagtcaagcgcgtgcgatcaaactggaacaggacgtgctgggtcacaacaatcgccttgctgcacacaaccgtcagcatttcgtcgcacatggtgtgcttgcactgaatctcgtttccagtccggggtcgggcaagacgaccttgctctgcactaccatcgaagccttgcggcggtgccgtgcggacctgcagctggccgtgatcgagggcgaccagcagaccagtcatgacgcagagcgcatccgggccacgggtgtacctgcgatccagatcaataccggcaagggctgtcatctcgatgcgctaatggttgccaatgcgtacgagcgcctccccttgcacgccgcggcacatgcgcacacccatgagcaccgtcaagaggacggacagcattcccaccatcatgaccacgagcatgctcgccacgatcaccacgatcaccgatccagcggcatcggcagcgtcttgttcatagaaaacgtcggcaatctggtgtgccctgcaatgtgggatctgggcgaatccgcgaaggtggcgatcctgtcggtgaccgagggcgaggacaagccgctcaagtatcccgacatgttcgccgccgccagcctgatgatcctgaacaagatcgacctgctgccacatctgcgcttcgatgtagcacgctgcatcgaatatgcgcggcaagtcaatccgcaccttcaggtgctgcagctgtcggccgcgacaggagagggcgtggacgagtggctagactggatgctggccggcggcgcggcggcaggggctgctgccgcaacggatggcgcgcgcatgcgtatcgccgcgccggaggccggaatcgctgccctcggaacgcagttggctcccggtccggcggtgtcgaaggagatgtgagatgcgagcgcagaccttgccagccggcagcgaccatgcgccggtgctggcttgcggtgcatggctgaagaatgccgcatgcctgttgcggggcgccgaggtcctctggtccccgatacatggcgatcttggagatccggccaactgcgatgcgcttgaccagtcggtcgaacagttacttgacagcgctcacggccaggtgcaggcggtggcgcatgatctgcacccggatttctatagcacgcaactcgcgcaacgcctggcggctcggctttgcgtgccggcagtggccgtccagcaccatcacgcgcacatcgccgcgctgatggcggaatacgatctgagagaacccgtgatcggcttggcgctggacggcgtcggtcttggcacggatggtacggcttggggtggggagttgctatgggtttctccgtcagagtggtgtcgcttggggcatctccagtcgctgccgctgcctggcggcgacgtggcagcgcgcgaaccctggcgcatggcagccgcagcgctacatgtgctggaccgtacgggcgagatcgggcggcgctacggcgccgttgtaggtgagcaggcggcccgtaccgtggcagcgatgctggaacggcaactcaactgtccacgatccagtagcgccgggcgctggttcgacgccgcggcgggtgcgctgggtgtcagtgtgcggcagcaggccgaggcgcaggctgcgatcgccctggaggcgcttgcggccgactatctgtccgcgctgtcgccgcctgaatgcgtcggtacgtacgtcgtggatcaggacggagttctggatctgcgtgggctgctggagcagctgtttgcgctggccgatgagggtcaggcggggcaagcggcgcggggcgcggcgctgttccatgtggcgctcgccgaggctctggtggggtgggccgctgacgcagcgcagggccacggactgaagaccgtggccctgggcggtggatgtttcatgaatggcattttgagcgccagcgtgcaagccggattggcagcgcgaggtttgcaagcgttgctgccgcgcgcggtatcgtgcggcgatgcagggctcgcgctggggcaagcctgggttgcggcccgccagcctacggctgccctggcgccgcaaacgcatctacaggaggagggcgcgccatgtgcctagcgattcccgcacgtttggtggaactgcaagcggaccagcagggcgtagtcgacctgagcggtgtacgtaagaccatatctctcgcgctgatggccgatgccgtagtcggtgactacgtcatcgtgcatgtcggctacgcgattggcaagatcgatccagaggaagcagaacgcacgctgcgtctgttcgcggaattggagcgagtgcagccgcctgcgtccgagccgatgcatgggatgaacattcatcaggagccggcatgaaatacatcgaagaatttcgcgacggcgagctggcgcaacgcattgcggcgcacgttcgcgctgaggcgcggccggggcaacgctacaacttcatggagttctgcggcggacacacgcatgccatttcgcgttacggcgtgaccgaactgctgcccgagaacgtgcggatgattcacgggccgggctgcccagtgtgcgtgctgccgatcggccgcattgacctagcgctgcatctggcgctggagcgcgacgccatcgtctgcacttacggcgacacgatgcgggtgccggcctcggggggcatgtcgttgattcgggccaaggcgcacggggccgacatccgcatggtctactcggccgctgatgcgctgaaaattgcgcagcggcatccacagcgcgaggtggtgttccttgccattggcttcgagactacaacgcctccaactgcgctgattattcgcgaggcgaaggcgcgccaggtggataacttcagtgtgttgtgttgccacgtgcttacgccgtcggccattacccacatcctggagtcgcccgaggtgcgcgactatggcactgtgcccatcgacggattcgttgggccggctcatgtgagtatcgtgatcggtacccggccctatgagcatttttcacgcgagtacggtaagccggtggtgatcgcaggcttcgagccgctcgatgtgatgcaagccattctgatgttggtacgacaagtcaacagcggacgcgcagaggtggaaaatgagttcgtgcgcgctgtcacccgcgatggcaacgagagcgcgcaggccatggtgtcggaagtgttcgagctgcggccgtctttcgagtggcgaggactcggcgaggtgccatatagcgccttgcgcatccgcgcgcagtttgcgcgtttcgacgctgagcaacgcttcgatctgcgctaccggccggtgcctgacaataaggcttgcgaatgcggcgcgatcttgcgtggcgtcaagaagccaaccgactgcaagctgttcgctaccgtctgcaccccggagaatccgatggggtcgtgcatggtatccagcgaaggtgcctgcgccgcgcactattcgtatgggcggttcaaggatatccccttggtggcagcatgagcggcaccgttaaactgggctatcaacggcccctgaacatcaagagcggcagaatcgacatgggccacggcgcgggggggcgcgcagccgcacaacttatccaggaactgttcgttgctgcgtttgacaatgagtggctgcgccagggcaacgaccaggcggctttcgccatgcctgccggggccagaatggtgatggccaccgacgcgcacgtggtgtcgccgctattcttccccgggggtgacatcggtagcctgtcggtgcacggcaccattaacgatgtggcgatggccggtgccaaaccgctgtatctggccgcgagtttcatcctcgaggaagggtttccgctagcggatcttaagcgcattgtcgaatcgatggccggggctgcgcgtgaggctggcgtgcctatcgtgacgggtgacacgaaagtggtcgagcaaggcaagggtgatggcgtattcattaccactaccggcgtcggcgtggtgccagcgggcattctaatcgacggcgccggggccaggcccggcgacgctattctgctctctggcactatgggggagcatggcgtagcgatcctgtccaaacgcgagtcgcttgaatttgacactgagatccgctcggacagcgccgcgctgcacgacttggtggcacagatgctggccgtggtgccgggggtacgagtgctgcgggatcctacgcgcggcggactggcgaccacgctcaacgaaatttccagtcaatcgggagtgggcatggtgttggacgaagcggcgatccccgtcctgccacaggtggacgcggcatgcgagctgctcgggcttgatccgctgtacgtggcgaacgaaggtaaattggttgccatttgcgcagctgcggacgcggatgccctgcttgccgccatgcgggggcatccgctcggtcgcgaggcacggcgcatcggagaggtcatcgaggacgggcgccactttgtgcagatgcgcacaaaattcggcgggatgcgcgtggtggactggctgtccggcgagcagcttccgcgcatttgttgagcgagtcggctatgcgcatattgctcctcacccatagcttcaacagtctgacgcagcgactgtttgtcgagttgcgccagcgcggccacctggtgtcggtggagttcgatattgccgattccgtgaccgaggaggccgtggcgctgttcgcccccgatctggtcatcgccccttttctcaagcgtgcgattccggaacgaatatggagtcgactggtctgtctggtggtgcatcctggcattgtcggcgatcgcggcccgagtgcgctggactgggcgatcgttcgagacgaacgaagttggggtgtgacggtgttgcaggccaacggcgagatggatgcaggtccggtatgggctagcgccacgttcccaatgcgcgcggcacgcaagagcagcctgtatcgtaacgaggtgacggtggcagcagtacaagctgtgctggaggcgctggcggcttttgaagccggctggcgttcggcgaatgatgcgcagagcggcccgggcacctggaatcctgcaatgcggcaggctgagcgcggcatcgactgggcgcgtgagtcgactgccgccgtgctggcaaagctacatgcggccgatagctttcccggcgtaccggatgccttgttcggccagccgtgccggctgttcgacgcccacgccgcgaccccgcagacggtcgcacgcgcgccgcgaggccagcctggcgatatcgttgcgcgccgtgagcatgccgtgctgcgcctgacggtggacgcaggcgtgtggatcggtcacgccaagctggccgtgcgcgatgagtgggaaaacacaagcctgccatctctcaagctgccggtggcgcaagtatttcatgaggcgtgggcgcaattgccggacctgtcgctgccgctggaacacgacgccggcgagtggagcgagttccggtactgggaagacgattccggcgcgggcctggtcggatacctcgccttcgactgctataacggggcgatgtcgaccgcgcaatgccaacggctttgcgccgccttgcgctacgcgcgcggtcgccagacgcgggtgctggtgctgctggggggagaggattttttcagcaatggtattcatctgcaccaaatcgaggcggcggagcaccggggcgcggagagcgcggccgatgcctcctggcgcaatattcaggcgatggacgacgtcgcgctggaaatccttgcgttttccgatcgcatgacggtgtcggcgctgcgcggcaatgcgggagcgggcggcgtgttcttggcgctggcggccgatcaggtatgggcgcgcgaaggtgtactcgtgaatccgcactacaagaacatgggcaatctgtatggttcggaatactggacctatctgttgccgcaacgcgtcggtgcgcaacgagccagtgatctgatggacggccgtttgccaatgtcggtccggcgggcgatcgagattgggctgatcgatgccagcttggacggcgacgcgcgctcgtgccttgccgagattggccgccgcgccgttgcgctggcccgggcgccagactatgctgcgcatattgacaacaagcggcgaaaacgggccgcagacgaagcggcaaagccgctggcccagtatcgagaggaagaattggtgcatatgcatcggaatttctatggattcgatccgagctatcacgtggcacgctatcatttcgtctacaaattaccccatgcacatacgcctcgccaccttgccatgcaccggggtggcagcctgccggcggcacaagagttgcaggcacttgcggggaaacgatcttgagccatgtctgacaagcaggccactgttcttgtcgtcgacgacgaaacccgttcacaggatgctctccggcgcactcttgacgaggaattccgtgtactgacggtcagctccgccgacgaggcacgcgccttgttgctgcgccagccggtctcggtgatcctgtgcgatcaacgcatgccaggcctcacgggggtggaatttctcaaagaggtgcgcgagcgctggccggaaatcgtgcgtatcgtcatctcaggctataccgattcggaagacatcattgcaggggttaacgaggcgggtatctatcagtacatcctcaagccctgggtaccggaccatttgatcgacaccgtgcgccaggcagtcgaggcacaggggctgcagggcgatatgcatcgccttgatctcgagttgcgcaccagcacgccggtcttgcgccagcgaagcagccagaaactggcaagtgcgcagagcgcattcaatttcgagcgcattgtgcgcgcaccgggcagcccattggatgccgtttgcgaggtcgccgcccgcgtggcgcgttatgatttgccggttatggtgctcggcgagtccggcaccggcaaggagttgctggcgcgcgccattcattacgccagcccacgcgcggcgcgcgcctttgtcagcgagaactgcgctgccgtgccggacaacctgctcgaatccgagttgttcgggcacaagcgcggcgccttcaccggggcgtacgaagatcatgccggtctgttccagcgcgcgaacggcggtaccatttttctggatgagattggcgatacttcgccggcgtttcaggtcaagcttctgcgcgtgctgcaggagggggaggtgcggccagttggctcgccacgttggataccggtcgatgtccgtgtcatcgcggccacccactgtaacctggaaagcgacgtccatgccggacggttccgcgaggatctttattaccggatcgctggcgtcaccatttcgatgccgccgttacgggagcgtagtggggatttgcagcccatcgcggccaagctgctggagcaggtggcgcaggagctggcccgccccggtctgtatttcggtggggacgcacttgcagcgatgatggcgtatccctggccgggcaacatccgcgaactgcgcaatgagatttatcgggcggtagcgctctcctcgggcgaagagattcgcgcgcaacatttctcgcgcaaggtgctgcacggtcagcccggcaccgtcaagcgtgggccgcatgtgcagactttcccgcagtcgggtacgctgcaggagcgacttgacgcgatcgaggcggtggtgctgaaggaggcgctcctgcgccatcgttggaacaagacccatgcggccaaggagttgggtctatcgcgcgtcggattacgtcagaagctgttgcgctttggcttggaggagaaatgaacgcgcctgtatgtaccggtcttgcctcagcaaaacccggcgtattgaatgtgctctggatacagtccggcggctgcggtggctgcagcatgtccctgctttgcgcggacactaccgatttcactggcatgctcaagagtgcgggaatccacatgctttggcatccctcgctatcgctggaaagcggcgtggaacagctgcaaatattggaagactgcttgcaaggccgcgtcgcactgcatgccttgtgtgtcgagggggcgatgctgcgcggtccgcatggtaccgggcgctttcatctcctcgccggcactggtgtgccgatgatcgaatgggtcagccgcctggcagcggtcgccgactacacgctggcggtcggcacctgtgccgcttatggcggcatcaccgcaggtggcgggaacccgacggacgcctgtggcctgcaatacgagggggaccagcccggaggactgctcggcctcaactaccgctcacgcgccggcctgccggtgatcaatgtcgccggttgcccgacgcatccgggttgggtgacggatgcactggcattgctgtcggctcgcctgctaaccgcgagcgacctggataccctgggccggcctcgattctatgctgatcagttggtgcatcacggttgcacgcgcaacgagtactatgaattcaaggctagtgcggaaaagccttcggacctgggttgcatgatggaaaacatgggatgcaagggtacccaggctcacgccgattgcaatacccgcctatggaacggagagggttcctgtacccgcggggggtatgcctgcatcagttgcactgaacccggcttcgaagagcccggccaccccttccaccaaacacccaaggttgccggcatcccgatcggtttgcccaccgatatgcccaaagcctggtttgtcgcgcttgcttcgttgtccaagtcagccacgcccaagcgagtgaaacttaatgccacggcagatcatccgctgatcgcgccagccattcgcaagacgcggctgaaataggaggcgagcatggaacgtttggtggtggggccgttcaaccgcgttgagggcgacctcgaggtgaacctcgaggtcgccagcggtcgggtatgctcagcacgtgtgaatgccacgatgtaccgcggattggaacagatcctgctacaccggcatccgcttgacgcgctggtctatgcgccgcgtgtgtgcggtatctgctcggtgtcccagtcggtcgcggccagccgcgcattggcggatcttgccggcgtgacggtacccgctaacggtatgctggcgatgaacttgatgctggcgaccgagaatctggccgaccatctgacgcacttctatctgttcttcatgccggatttcacgcgcgagatatatgctggccgcccctggcacaccgacgcgacggcacgtttttcgcccacgcatggtaagcaccacaggctggcgattgccgcaaggcagcgatggtttaccttgatgggcaccctgggcggcaaatggccgcacacagaatcggtgcagcccggtggttcgtcgcgcgccatcgacgccgctgagcgcgttcgcctgctgggccgggtgcgcgaattccggtgctttctcgagcagacactgtatgccgcaccgctcgaggacgtcgtcgcgctcgacagcgaagtcgcgttgtggcgctggcatgcgcaggcgccgcaggccggagacctgcgatgtttcctcacgatcgcgcaggatgcggcgctggaccagatggggcccggcccgggtacgtatctgtcatatggcgcctacccccagcccgaaggcggtttttgcttcgcacaaggtgtgtggcgtagcgcgcaagggcggctcgacgcgcttgatcttgccgcgatcagcgaagatgccacctccgcctggttagtcgaccaagggggggcgcgtcatcctgccaatggcctgaccgcgccagcacctgacaaggtgggcgcctatacctggaacaaggcccctcgattggccggcgccgtgctggagaccggtgcgatcgcccggcagttggccggcgcacagcccttggtgcgtgacgcggtggcgcgctgcggcgccaccgtctatacgcgcgtattggcgcgactggttgaactggcgcgagtggtgccgttgatggaagactggttacagtccctagaaatcggggccccatattgggcgtcggcccacctgccggatcagggcgctggcgttggccttacggaggcggcgcgcggcagcctggggcactgggtgtcggtgcgcgatgggcgaatcgacaattaccagatcgtcgcacccacgtcctggaacttctcgccgcgcgatatagccggccagcccggggccgtggagaaagcactcgagggtgcgcctgtgctgcaaggcgaaacaacgccggtcgccgttcagcacattgtccgctccttcgatccctgcatggtgtgcaccgtgcattgagcatgcacctcaatcaccacgatcatatggcacgggcaagccgaagccgacgtggcaacgttgcgtcgcatcctcgggcacctgattgccattatcgccatgtccagtaagaggaccactacatcaagcgggagtcacggcgtcgatctggacgccatgacaccatcgcaactcgagggtatcgacgaagcgacctggctggacgtgatccgcaaaatggacgaggtctacctgcaattgatagaggacgaagtagcgctggaggaaaagaacgctcaactggagcagtcccagcaattcatcttcagcctgctttcggcgatgtcggacgtactggttgcttgcaatgcgcgtggcgaaatagaggagaccaatgtggcgctgcgcgaactggtaggcatgcaggagagcgctctgcacggcatgtcgatttatcagttgctggccgacgacgacagcgccgcgacgttgcgcacggtgatcgacaatgtggggcctggccggagtttcaacgttgtcgagctaaatctgttcgatgccgaacgcagcatcgtgccggtggacgtcagttgcacgccccgtatcggtccgaatggcaggcgtgaaggctatgttttcgtgggtcgcccaatggccgagatcaaacgtgcctatcatcaattgcgcgaggcgcacgaggcactcaagcgtacgcagcagcaactgctgcatgcggaaaagatggcatcactcgggcgccttgtcgctggggtggcgcacgagttgaacaatccaatcagcttcgtgctggggaatgtgcacgcgcttaagcgctacagcgaacgcctcgcagcctacgtggcattgctgcatagcggagaggatggcgctgaagccgagcgccagcggattcgcttgcgcatcgatcatattctgcaggatatgccgtcgttgatagaagggacgctcgagggcgcgcagcgcactgccgacatcgtgcgtggcctgacgcgcttttccgctgtggatcgtgaagagccaagcgtgttcgatttgagcgaagtggtgaaaagggccattcactgggtgaagaaaggaactgcgccgactttcgaagtccattggtcaccgctaccgggatgcctggtgatgggcagcgccgggcacgtgcagcaggtaatgatgaatctgattcagaatgcctacgatgcggcggggagccgtgacgatgccgttccggcattgtggatcgccttggaccgactcgacgaccgggtcgtgctgcgctttcgagacaacggtcccggcattgcggctgaacacctggcccgcgtgttcgatccattcttcagcaccaagcctgttggcaaggggactgggcttagtctttcgatcagctatggcattgtcgagagacatggcgggcgcttgctcgtccgcaaccacccggagggcggcgcggagttcacggtcgaactgccagctgctcacgacaaggggtcgtccgcagaccggcgttgatcggttgccggggcccggctccgcccgtgttccggggaacgcctgttcgaaattggcggaggcaggaggctgatggcctgatttccctgctgcaccaggctagaaagcgctgctccggctatttagactcccatggaacatggtattgccatctggatatgggcatgtcaccaatgcgatgatcatgcaaacctgctttgcagtcctcacgtacggacttgcgcagcagataccgctatttcgggaatagcataagcgaaccaagacctgagagtgagcttctgccgcattcgccaggagttggctcgcaggcgcggaaattgcgttacggtgcagtcgagccttactggcaaaagccgcggatgacagcggcgtcggaaccgagacaggagacttccagcatgttccaattgctcgctggcgtacgcatgaattctactggccgcccgcgggccaagatcatcttgctctacgcgctgctgattgcattcaatatcggcgcctggctctgcgcgctcgccgcgtttcgcgatcatccggtgctgctcggcaccgcactgctggcctacggccttgggttgcgccacgcggtagacgcagatcatctcgcggcaatcgacaatgtcacccgcaagttgatgcaggacggcaggcggcccatcacagctgggctttggttctcgcttggccattcaagtgtggtagtgcttgcttcggtgctgatcgctgtcatggcgaccacgctccaggagcgtctggacgcgtttcatgaagtcggcagcgttatcggcacgcttgcttccgcgctatttttgttcgccattgcggcgatcaatctggtgatcctgcgctcggcgtatcgggcgttccggcgtgtgcggcgcggcggcatctacgttgaggaagactttgaccttctgttcggcaaccgtgggttcctggcgcgtatcttccgtcccctgttccggttcatcacacgcagttggcatatgtacccgctcggcatgctctttgcgctcgggttcgataccgcgaccgaggtcgccttgctcggcatctcgacgatggaggcttcgcgtggcgttccgatttggtcgattctggtatttccggcgctgttcaccgccggcatggcgctgatcgacaccatcgatagcatcctgatgtgtggcgcctatgcgtgggcctatgccaagcccgtgcgcaagctctattacaacatgacaattaccttcgtatcggcgattgttgccctcatcgtcggtggcattgagacgcttggcctcctggccgacaagttcatgttgaagggcgttttctggaacgcggttggcgctttgaacgagaatttctgtcaattgggcttcgtcattattggcatctttaccgtgtgttgggtcgtgtcgatcgtcgtctatcgcttgcgccgctacgacgacagcgaagtgcgtgcctgagggcccgccaagctgtcccaatagtccccaccgggcgcgccggctcgcaaaacgtgaaacgtccacggccagggaagcgcttcctggcagataggaaggcttgctgcgtgaagacgtgcaggccccttccgactaggactaccacgtcgaggcgacccgcctcgcctgcgggatggcgcactcggtcgacgtctcggtcaaggcgcgcggggcaacttgaactcactcaaaaccggtcacgccggcgagtttgatctcactgatgaggagagcgagcggtcgaatgctaccgcgggcgcgaatatactgccgtaccggcgcagagattgaaatctctatcctggcggaaaatgacgtctcgaagcgcgatgtcccgaatctacaaaggcgacgcttccgaactcgccactggtcgggtgcgctcggtgtattgactcgctaatgcccgcttagcagcgagcatattagggcaatgctgattaagtctttcggttcgtgagagtaagcgttatctgaagaatcacgagcgcgaagagatgaacatgaagcagatgacgttcgcggcgggtgcagatcaagaggcgggattcgagcaataccgtaagccaacgcgacgcgagacatttctggcgatgatggagacgatcgtgccgtgggcggcattgtgcgccgtgatcgagccgtactatccgaaggcgggcaacggccggccgcccattggcctggaacggatgctgcgcatccactttttgcagcactggttcaacctggcggatctggcctgcgaagaggcgctgtatgacagcgccagcctgcgccgcttcgttgggattgacctgggtcgtgaaccggtgccggacgccagcacgctgctgaagtttcgccggttactggagaagcaccagcttgccgagcggctgttcgctgaggttggccgggtcctccaaaccaacggtgtaaagctgaagactggcaccattgtggatgccaccatcatcggcgcaccgagttcgaggaagaatgaagagaagtcgcgcgagccggagatgcaccagactcgcaaagggaagcaatggtgtgtgtcacgaacgcaggcttaagtctgcgatgctgtactgaagatgggagaaggcctcccggagtcggcttgcaggagcagattccaaaccacccggtgctgctgcgttcaaaaggcgtggtggtgagcgaccggggacgtcatccgcagaggatggcgggtacgtgctgagaaagcaaaccgtccgatgacgcatcgttattgccagggcgctgtcgaaactgaggccggccattcgcttcaggacaaaccgggacgacacctgtttacgggtccggtggcagccggtgtataggcggcatgatctcagcgcaggctttggtacggaacgtgagaatcttgctccagatgtgaagggaaatgacaaatggcagacaccatgaggaagaataccgatgctggagtgaggggcggagccgcccgtagtagcgttgaagttcctgtaatgggaatggagcgaaggggcggcgttatcctgctgatgaacgcggtcaacctgcggggatgagcggcgtgaaatcggcgaagccgtacaacattgcgaagcgcacggtatgggaggcataccagcaggtcaaggccaaccgtggcgctgccgggatcgacgatgaagccatcgccgagttcgagcagaacctgtcgaagaatctgtacaagctgtggaaccggatgccatcggggtcgtatctcccgccaccggtcaagcaagtggagattcccaaggcgtcgggaggtacgagaaagctgggggtgcccacggtcgcagaccgtgttgcgcaaaccgtggtcaaactggtcattgagccgggtctcgacgcgatcttccatccggactcctacgggtaccggccggggcggtctgcgaagcaggcggtagcgatcactcgtgaacgttgctggcgatatgactgggtggtagaatttgacatcaaggcagcctttgatcagatcgatcatggactgctgatgaaagcggtgcgcacccacatcagggaagactggatactgctatgcatcgaacggtggcgggttgcaccgttcgagacagcggacggggtgcgtgtgccccgcacgcggggaacaccccagggcggtgtgagcagtccgatcctgatgaacctgttcacgcattacacattcgaccgatggatgcagcgcaccagcccaaactgtccgtttgcccgctacgcggatgatgcggtggttcactgcaatagccgcaggcaggcggaatacgtgatgcggtccattgcagcacggctggcagcttgtgggctgacgatgcatccggagaaatcgaagatcgtgtactgcagagacagcgcaaccgcagcgaacgccatctgcacgcgagctttacgtttctcggttttacgtttaggccgaggaaagcgctcagcccgcaaggggggccttttaccagcttcctgccgggagccagcgagagtgccttgaagcggatgcggcaggcagtgcggggttggcgactcaatcgccagacccatgtaacacttgccgatgtggcgagactgtacaacccagtgatacaggggtggtggaattactatggcgcgttctacaagactgcgatgcttcacatcttccagcacatcgactgcgctcttgagcgttgggcccgacggaagtacaagggtctgcacaggcgcaagcgacgaagtgccgaatggctggacaggatgcgccgtaacaacccgatgctgttcgctcactggcgtgtggttacgcaaccggctggataacgggagccctatgacgcgagagtgtcacgtacggttctgcgagaggctcggggggcggttccccgggtctacttaccacttcggcatgaagctccacattggcgtggacagtcagattgggttggcccattcggcagtcgtaacgccagccaatgttcatgacaagcatgcagtgcaccagctattgcatgggcaggagcagcgagtctatggcgatagcgcctacgccagtcagcaggcgctgatcgcgtccaaggcgccccgcgccaaggacttcaccaatcagcgtacgcgcaagagcgggcagattgacgaggtgcaacgtgggaagaaccgcaacaaatcgaagatccgtgctcgggtcgagcatgtgtttgccgtagtcaaacgcctgtggggcttcactaaagtacgctaccgtggcttgaagaagaatgccggccgggccttcacggccctggcgctggccaatctgtacctcagccgagggcatttgatgggagcagtccgtccgtaaagggcgaatgtggggcaagtgctccgccaacacgccccatttgggatgcggcaggaaaaattcgcgtcatcagagccgagtttttcgaccgcacacgttcttatcagtctgaacacaccaattcacgcggcttgttcagcatagccttagtcgccagccgtactccgtagaagaccaacttgcctcaagcaatctttggagatgattccgatgactcagaaattgaccttcacccgatttgtcatcgccgagcagcatggctcgaagaccgttgattccgatctgatcgcgctgttgctcgacgtctccattgcttgccggaagatcgccagctcgatcgccaagggctcgccgctggcgctgggtggcgaagcggcaggacgggacgtacccggggaaatccagagcaagaccgacatggccaccccctgtttcttcgcgcgctcggaagcgctcgcccggcacttggccggaatggcgtcggaaggcatggaaggggcctatccggtgccgctccgctcgccccagggcaggtacctgctggtttgcgatccgctcgacggctcggccaacattgacgtgaacgtctctggggggatcatcttctcagtcctgcgttgcccagaaggcatatcggcgcctgaggagcgcgacctcctccaagcgggtagcgcgcagatggccgcgggatacgcactgtacgacgcgcccgcgctgctggtcctgaagaccggcagcgggatccatggatttacgctcgacgcggattctggccaatacgtgctaacccacccgaacgcgaagatcccgcaggtacctgctggttcgcgatctgcgcttcggccaagtacttctgggcagtcttgaaggaggctcaatgattcagtgtgcattcaagattgtgatgaaagccgtagggaagaattgcgcatcgggtcaaaggccgggttgtcgtgacgctccccaggcgctcgcgccgcattgcggcccgtgcctgcgacggccctcgacgctggcgatcggagttgcggtaagctgctgcgccatccctcatggcgcctcgatcgccggcggcgtgcagcagcccgaggcgcaactcaggacggtgaccgtgcaaggctcgcaggcggaggcagatgcgaccggggaggctgccagtcagggctatgtcacgcgcgggcagctcgaaaaccggccactgctgcggcccagggaactgcttgaaacggtgccggggctgatcgtcacgcaacacagcggcgacggcaaggctaaccagtacttcctgcgcggcttcaacctcgaccatggcaccgacctggccaccaccgtggcaagcatgcccgtcaatatgcgcacccatgtgcatggccagggctacaccgacctcaacttcgtgattcctgaactggtgagtggcattgcctacaagaagggaacctacttcgcggaagagggcgatttctccgcggccggcgcggtccggatagattatgtttccagcctgccgcaaggcatcgcgcagctggagctgggccagcacggctaccggcgcgcgctgctggccgactctaatcaggtaggaccgggcacgctgctctatggcttcgaatggttgggcgagaacggcccttgggtgctgccggaaggcgtgcacaagctcaacggcgtgctgcgctacagcttgccgctgggcggcggcgagcgcctaggcatcacggcgatggcttacaagaacgcctggaactcgacggaccaggtgccgcagcgcgccatcgaccagggcctgatctcccgctttggccatatcgatcccaccgacggtggcgcatcgtcgcgctacagcctttccgccgactggcagcggccgctccaggacggccagttcaaggccaatgcctatatgatcaagagccgcctgcaactgttctccaacttcacctacgcgctgaacaaccccgagcgcggcgaccagttcgagcagttcgagaaccgggtgaccaccggcgccaatgcgtcgcgcacctggttcggcacgctcgcgggacgcgacactgagtccgaactcggcacgcagctgcgctacgagcggctcgatcccattacgctcaacaacactgcggcgcggcattcctaccagcaagtccgcagcgaccgcgtcaacgaaaccagcgccgcgctgtatctgcgtaataccgtccaatggctgccctggctgcgcaccgtggccggcctgcgcgcggaccagttctggtacggcgtgtccagcgacaatcccgccaattccggcaacggtcgtgatcacatcgttagccccaagctgagcctggtgttgtcgcccacggccaagaccgatgtgttcgtcaactgggggcgcggatatcacagcaacgacgtgcgcggcgccaccgccacggtcgatccttccacgggagatcccgtgcaaaaggtgagcgtgctagttcccgccacgggttgcgagctgggtgtgcgcacaggggacgtgttgcccgggctgcagttgtcggcatcgctatggcgcctcaatatcggctctgaactggtgttctcgggcgataccggcactaccgagccgagccggccaagccggcgcacgggcatcgagctgaccgcctactatgtgcccatggcagggctcatcatcgacgcggacgccgccttttcccgcgcgcgtttccgcgatcacgagagcatcggcgactacattccggaatccatccagaccaccgcgtcgatgggcttgtccgccaaccggggccgctggtcgtttggcgcgaggatgcgctattttggcccgcgtccgctgatcgaggacaacagcgtgcgctccgcctcgtccttcctggtcaatctcaagctcggctaccgcgtgcaaaagaacgtgcggatcttcgcggaagtactgaatgtgctgggcaagcgggccaacgatatcgactactactatgcttcgctgctcaagggagagacatttcccctggatgccagcggtgcggccgccggcatcaacgaccaccatatccatccggctgagccgcgcaccttgcgcgttggcatcacctggagtttttgataacgaagcaagcggccccggctagggtggccacactccttcggccgctcaccaggcctaatcccattcggaacaagagttttgacgtccgcataaatctcaactagcggttcttagcggacagcgcccaatcgttcggattttccgatccgtgcgtttcttctgcatcgcaacatccgtgcagccggtcagcagcttttcattttgggctgtgtaccgattagattgatcgtcacaacgatgcgtgaaaagcgatcgcagccatgcaacgcgccagcaagctcccttttccactatctttttgatcccggttgtcatggcacagaatttgccaattaatagggaacttgtcagatgattgtgcgactgcagcatccatcaaaagaataatgaagaggtggctaggctcatttgattacacacatctcagtcgtcaagttcacgggcgtaccggaggccggcggcaaaatccaccactcgctgcagcccttgccagatggtcttgactccgggttcgccgtcgcctttgcgcgccaggaagccgccgagcatggcgaccaagcgcacgacctcgttcagacgcggtgacgtcttcggtggtttcttcttgttgagaatgaatgccgcgcgccattcatcccgctcgaacagcagccctgcatccaggtccgggcaagttcggcccagtcgcatcaaccgagcgatgcgccatgccaccaccatgaacagcgccaaggcacgctcaagccgtgccatcaatgtgaccttgcccctgttccacgaatcccataagcgagggaattaggcagcccggtgttgctgagctgcgaaccagtttttctcgaacgtcatggggctgacgtagcccagcgtcgagtggagccgggtggcattataaaagccaagccagtcaattacctcatccattgcggcgcggcgggtagcgaactggcgaccgtgcaggcgagcgaccttcaacgacccccacagactctctgtcggcgcgttgtcccagcaatcgcccctgcggctcattgacgagcgcatgccatacgccttcagggcgtcttgaaacaggtgactgcaatactgggcggattcaatcggtcggtgtgcacaatcaaaccggcttccgggcggcgccggaaccaggccatgcgcagcgcgtccgtgaccaattcggccttcatgtgtggttgcatcgaccagccaaccacctgccggctgaacaggtcgatgatgaccaccaagtagagccagccttcggctgtcgccacataggtgatgtcgctcgtccagacttgattgggtgctgcaggactaaagtcgcgttgcagcagattgtgggccaccggcaaatcgtggttcgagttggtcgtcgcaatgtacttgcgcttgtggcgggcgcgaatgccgtgcagtgccatcagcttgcgaacacgctccttgcccacccgcacaccacgcgccagcagttccttccacatgcgcggccagccgtactcccccttgaccccgacgtgaatcgccttgatgtgggccagcaaggcatcgtcactgagtcggcctctatcgggcctgtcggtgcttactgtgcgttgcttgcgctggtgatagccgctggggctgacccccatcagctcacacaggaccgagaccggccagtaacgtcggttttgctcgatgaacgcatacttcacaccgactccttcgcaaagtatgccgcggctttttttaaaatatcgcgctccatcttcaagcgcgccacttccgcccgaagccgggccagctccatctgctcgggactaaccggcttcatccccgccccagtcagcttgccttcccgctccgccttgacccagttatgcagcgtctgcgctcttatacccagggtcgcgctaaccaccgccatgctttgcccgctcttcaccagccgtaccgcttccagcttgaattccagcgtgtactgcgcccgctttgtcttgcttgtcatcacatctctccttgcttcagtttaacctcagcaagggattcgttttacgggggcaagctcaatgcgagttgcaacgcctcgacccgacagccgttcttaagcacgtgaaagaatagttcgacctcccaacgcgcgcggtaccagtcaataagctgcgccgctgcgtcaaggtcgtccacctcgcgattactcagcagtcgccattcaatcggcttgacgcctgccggcgggtcgacctcccgggcgacgatgcaagtggcgctcaccacgccgcccgcagcatcaggcaacgtgacacgttgcgcccacacctgctgccgtaccgcgcgcgccggctgagcctgacgggctgccagcgtaaagtgaatcctgcccactggcttacccgcagtcacttggtcccacagcttgccgccgccaggcaaggtgcgattgtgctgcgagcgcagtagccaatccgccgggtggcccaactcctttgccttgaccatcagcgccatgatgtccgactcccggtcagccacatagacgagtcgcgtggcaggcagtgcggccgcctgttcggcgacccgctcatatccttcggtccagcgggtactttccttgatgccggggcgcacgccatccgcacccttgggctcgcgcgcccacatgtaggcgtcaagcacgcccagcggttcgcgcgctggcgttaccgcgtaagtcgggtgcagatatagcccgcgttgcgcctcatacgacagcggtcccaagcctgcgatggcctggccgttaaagtccaactctaacgcagagtgtatttttatgcggagccccgttcatggaggccccgttggcgaatgaatttgactacttttttctctgcataagggaacccggtcttagagaggcgatgagttcatccgtagccttgaagcgtccggaacgcagatttggcgggacgattgcttcgagcgcttccaattttaccgatgggtccgcacgtgtgtagatctcggtcgtctgcatgtgtgcgtggccgagccaaagcgaaacctttctgagatccttggtggcttgcaggacggacaacgcacaagtgtgcctcctatatcgttcacgatataggaggcactatgtgcccttcccgactatgtctggtaatcgaacgatagccctatttcgcgggcaaacagatggccgcagatagagatagtcttgactccttccttcagccccagagcattcgggaaggagtccatcatgagatacaccatccatgaccgtgtcgttctcgcacgcgcaccagacggcccgctcgcgtcccatatcgccgcctttgcaagctcgatcgctgcgcagggatacagcacccagtcactgaagtatcacgttcggctcgttgcaggttttagccgctggctcggtcgaaacggaattgacttgcgtaatgtctgtcctgatcaagcggcgcgttacttacgttaacgcgcgcggcacgtgcgaccgggtccgggagatcgtgctgcgctcaagcatctcattgcttttctcgatcgtgagaggctgattccggcgcagaggacgcccgcgcgtcggctgaccccggttgagtcctgtaccctggcttacgttgagtatcttcgcgaggtgcgcgccctgtccaaggcgacgatcatcaactacacgccgttcatcagggagtttctcgaagattgttttggtgaccggcgcgtcaggctttcgcgtttgcgtgccggcgatgtcgtgaactttgtgcaatttcaggcacagcatctgcatctgaagcgcgcgaagctcatgacggcagcgctgcgatccttcctacgttacgcgtgctatcggggcgacatgacgctcgatctggccgccgctgttcccgtggtggccaactggtcgatgcagtccatccctcgcgggattcccccagagcagatacaggaactgctggtcagtatcgatcgacggactgccgttggtcgtcgtgattacgccatcatcctgctactcgcgcgcctgggactgcgttctggggaagtggcatttctcgacctcgacgatattgactggaacacaggagttttaagcgtgcgcggcaagagtggcctgcgtaacgggctgcctttgcccgccgatgttggcaaggcgattgcagcgtaccttcgctacgggcgaccgcagagcacgagtcgccgtgtatttttgcgtgcgaaggcgcctttcaccggctttcgtagtgcgtgtggcgtgggctccatcgttcggcattcgctccagcgcgccggtatcaacgccccaaccactggggcacaccagtttcgtcatgcactggccagccagatgctccgtcacggcgcgtcactccgtgagattggtgagttgttgggacaccatcatccacagaccacgtcgatctacacgaaggtcgacatcaaggcattgcgtacgctggccgtaccgtggccgggaggtgtgcgatgaacacgctgcggcaggccgttcaggagtatctggacctcaggcggagcctgggcttcaagctgagggaggccggcaaggccttgcctgatttcgtcgcgttcatggagaggcaccgtgcttcctttatcacccaggcgttggcgctcttgtgggcccagcaaccttccaacgtccaacccgcccgctgggcgagccgactcagtatcgtgcgcgagtttgcgcgtcatcgtagtgcgaccgacccacgcacacagattcctgcaccgggtctgctaccgttttcgccgaagcgggcccgaccatacctatactcgagcgacgagattcgcagactactccatgctgcgcttcagatgccctgccgcttcgcgcgtgacgaactgcaaccatggacctattactgcctgtttggcttgctgagtgtatcgggaatgcgcctgggcgaagcgcgcaatcttgagcttcaggacatcgatctgacagcggcaatattgacgatccgcggcgccaaacttggcaagtcccggttcgttccactgcatgcgtcgacctgcaacgtgctcgcggactatattgcacgacgcaaacgtcattgggcggggcgacccgtgtcctcctacttgttcgtgtctaaccagggcaaccgtctggatagtggcgagattcatcgacacttctatgcattgtcccggcagatcggtctgcgtggcgcagccgacagtcacggcccacgtctgcatgacatgaggcacgtatttgcgacgaatacgcttttacgctggtaccgttccggacaggaccccgagcgccgcctgcccatcctgtcagcttacctcggtcatgtccacatcgaggatacgcagtggtatctgaacgcctcgccggagctgatgcgcgaggcgatgcgccggctcgaacagcgctgggagattcaaccatgactactaccgccagtctcgctccgttgctggagcgtttctttacgcaacgcctgatgcagcagcgccaggcgagtccccacacgattagttcctatcgcgacacctttcgtcaattcctgaagttcgcgctgcaacgcctgcaccggcagccttcacgcatgaatttcgaggaaatcgatgcccctttgatcgttgcatttctcgatgacctggagaagcgtcagggcgtgagcgttcggagtcgaaatcttcgccttacggcaattcattcattctttcgttacgcggcgctcgagacgccggctcattccgcgcagatccagcgagtgctcgctatccccagcaagcgctttacccgcaccctggtgcaattcctgacgcgccaggaagtcgatgcgctgctcgccgcaccggaccagcgtacctggtccggccgacgcgatcacgcctttttgctcttcgccgtacaaactggcctgcgcctgtccgagatgactggacttaagcgcgatgacctcgtcctcggaatcggtgctcacgtgcgggtgatcggcaagggtcggaaagagcgttgtacgcccatcgtcagatccacgctcgccgtgctgaaagcctggcttcgggaacccaagcgcggtgagggggacgtgctttttccgaacgcgaggggcgaacgtctcaccgttcatggcgtgcagtatctcctaaacaagcatcgagagaccgcgtcaaaagtttgtccgtcgttgaagcacaaacaggtcaccgttcaccgtttgaggcatacgatggccatggaccttctgcaggcgggcgttgatcgttccgtgattgcgctgtggctcgggcatgaatcggtggaaaccacgcagatttatctcgaagcgacacttgcgatgaaggagcaggctctcgcgaagacatctctggctcaaggcaagccaggacgctaccggcctgcagaccaacttctcggcttcctgaatggactgtaaggccacggaactatgtcgggtaatgactggcgggatggctccgcgagaagtgcgcatcggacgatcacggacgctcatcctcattacccgatatagtcaggaagggcatatagtgccgcagtgaatgtggtgtcggcctcggcatcccagggccacacggtaggcctatcttcttcgcggcagcgcgaaatgcgatttcgacatcattgataattaatggctttcttgccgtcgaaatgaacacgtgatcgtcgaatggagcgtagggccgccgccgttccaaataccgctccagcccggccccagcgctgtcgtgcaagggaacgaggcggctcttgttgctacgccgctagcggcgtagtcgcaactatgccgcgttcacggcaatgccgatcaagctgggatcggatcacgatgatgcttatagagagcccagcaggaggtcattcccaaagtcgccggatcggcatagttttaatggctaaagacccttgagaaacgtcgcgagcttactgtcaggccggtatcgtacgggcttgccatcatgtggtccgacattagcgagaatcttttccttcagctccagactggcatccaggtaaatctgggttgtctggagcgattcgtggcccatccacagggcaatgttgaatggatccacgccagcttgcaataattccatggctgccgtgtggcggctatatcgtccacgatataggaggcactatatgcccttcctgactatatcgggtaatgagggatttgcctccgtgctcgtccgatgcgcacttgttgtggagccatcccccgtcactacccgacatagtttcgtggccctacagtccattcaggaagccgagaagttcgtctgccggccggtagcgtcctggcttgccgtgagccagagatgtcttcgcaagagcctgctccttcatcgcaagtgtcgcttcgagatagatctgcgtggtttccaccgattcatgcccgagccacagtgcaatcacggaacgatcaacgcccgcctgcagaaggtccatggccatcgtatgcctcaaacggtgaacggtgacctgtttctgcttcaacgatggacaaatttttgacgcggtctctcgatgcttgtttagcagatactgcacgccatgaacagtgaggcgttcgcccctcgcgcttggaaacagcacgtcgtcctcaccgcgctggggttcccgcagccaagctttcagtacggcgagcgtggatctgacgatgggcgtacaacgctctttcctacccttgccaatcacccgcacgtgagcaccggttccgagaacaaggtcatcgcgtttgagtccggtcatctcggacaggcgaaggccagtttgcacggcgaccagcaaaaaggcgtgatcgcgtcggccggcccaggtacgctggtccggtgcggcaagcagggcatcgacttcctggcgagtcaggaattgcaccagggtgcgggtaaagcgcttgctggggatagcaagcacccgctggatctgagcggaatgagccggcgtctcgagcgccgcgtaacgaaagaaggaatgaattgccgtgaggcgaagatttcgactgcgaacgctcacgccctgacgctgctccaggtcatcgagaaatgcaacgatcaaaggggcatcgatttcctcgaaattcatgcgtgaaggctgccggtgcaggcgttgctgcgcgaacttcaggaactgacgaaaggtgtcgcgataggaactgatcgtgtggggactcgcctggcgctgctgcatcaggcgttgcgtaaaaaaacgctccagcaacggagcgagactggcggtagtagtcatggttgaatctcccagcgctgttccagccggcgcatcgcctcgcgcatcagctccggcgaggcgttcagataccactgcgtatccgcgatgtggacgtgaccgaggtaagctgacaggatgggcaggcggcgctcggggtcctgtccggaacggtaccagcgtaaaagcgtattcgtcgcaaatacgtgcctcatgtcatgcagacgcgggccgtgactgtcggctgcgccacgcagaccgatctgccgggacaatgcatagaagtgtcgatgaatctctccactatccagacgattgccctggttagacacgaacaagtaggaggacacgggtcgccccgcccaatgacgtttgcgtcgtgcaatatagtccgcgagcactttgcaggtcgacgcatgcattggaacgaaccgggacttgccaagtttggcgccgcgaatcgtcaatattgccgccgtcagatcgatgtcctgaagctcaagattgcgcgcttcgcccagacgcatgcccgaaacgctcagcaagccaaacaggcagtaataggtccatggttgcagttcgtcgcgcgcgtagcggcagggtatctgaagcgcagcatggagtagtctgcgaatctcatcgctcgagtataggtatggtcgggcccgcttcggcgaaaacggcagcagacccggtgcaggaatctgtgtgcgtgggtcggtcgcactacgatgacgtgcaaactcgcgcacgatactgagtcgtcgcgcccagtgcgcgggttggacgttggaaggttgctgggcccacataagagccaatgcctgggtgatgaaggaagcgcggtgcctctccataaacgcgacgaaatcaggcaatgccttgccggcatctttaagcttgaagcccaagctccgcctgaggtccagatactcctgaacggcctgccgcagcgtgttcatcgcacacctcccggccacggtacggccagggtacgcaatgccttgatgtcgaccttcgtgtagatcttcgtggtctgcggatgatgatgtcccaacaactcaccaatctcactgagtgacgcgccgtgactgagcatctggcaggccagtccatggcgaaactggtgcgcccccgtggttggggcgtcgatgccggcgcgctggagcgagtgccgaacgatggagcccacgccactcgcaccacgaaagccgataacaggcgcctttgcacgcaaaaacacacggcgactggtgctctgcggtcgcccgtctcgaaggtatgctgcaatcgcctttccaacatcggcgggcaaaggcagcccgttacgctggccactcttgccgcgcacgcttaaaactcctgtgttccagtcaatatcgtcgagctcgagaaatgccacttccccagaacgcagtcccaggcgcgcgagcagcaggatgatggcgtaatcacgacgaccaacggcagtccgtcgattgatactgaccagcagttgctgtatctgctctggtggaatcccgcgagggattgactgcatcgaccagttggccacgacgggaacagcggcggccagatcgagcgtcatgtcgccccgatagcacgcgtaacgtaggaaggatcgcagcgctgtagtcatgagcttcgcgcgcttcagatgcagacgcagtgcctgacattgcacaaagttcacgacatcgccggcacgcaaacgcgaaagcctgatgcgcccgtcaccaaagcaatcttcgagaaactcccttatgaacggcacgtaattgacgatcgttgctttggacagggcgcgcgcctcatgcagatactcaacgtaagcctgtgtacaggactcaataggggtcagccgacgctcaggcattctctgcgccgaaatcagcctctcacgatcgagaaaatcaatgagatgcctgagcgcagcacggtctcccggacccggtcgcacgtgccgcgcacgataacgtaagtattgcgcactgtgatcaggacagacgttatgcaagtcaattccgtttcggccaagccagcggctaaaacctgcaacgagcctaacgtggtacttcagtgactgcgtactgtatccctgcacagcgatcgagttcgcaaaggcgacgatatgggacgcgagcgggccttctggtgcgtgtgcgagaacgacacggtcatggatggtgtatctcatgatggactccttcccggatgctctggggctgaaggaaggagtcaagactatctctatctccgtgcatccgtttgcccatgaaatagagaggcctcttttgaatttcaagtgggtggtatcgtggcgggtttcaggtaaagagcaacaagagcgatgcatagcaaactgtttgaagcagcccttggcataagcgatccgtggttcgtccgggaagtcgacttcaacgcgcaaaccaagacgttgacgatccagattgactttgtcgccggcagccgcttttcccacccggaggtcgccggtgggcacccggttcacgacacggtgaccaaacgctatcggcacctgaacttcttcgagcacgactgctatctggaagtccgcacgccacgcgtgaagcttcccgacggccgcgtggtgttggtcgagccggactgggctggcaagctctctggcttcacgttgctgtttgaagccatggtggtggcgcttgcgcagcagatgccgttttctgctgtagccagaacggtgggtgagtcgtggcatcgcgtgtacgctatctgcgagcgctatgtcgacctcgcggtggccgaactcgatctggccggcgtgaccgctgccgccgttgacgaaacgtcctacaggcgcggtcacaactacctgacgcttgtcgctgatgccgacgcgcgtaaggtcgtgtttgtgaccgaaggcaaggatgctgccacggttggcaagttcgctgcacatctgcgcgagaacaacgctgcgcctgagcagatcggggtggtcagtatcgacatgtcgccggcgttcatcaagggcgtcagcgagcatttgcccaacgcgcgcatcaccttcgacaagttccatgtcgtggctcacgcttctgcagccgtggacaagacccggcgtatcgaacagaagaccgatccaagcctcaaaggcctgcgctggacgctgctcaaggatcgcgacgggttgccagccgcgcagcgtgccgatctcgacgcgttgatcgccaacgtcacgaccaaacgcactgcccgtgcctggctgtatcgcgagcagttgcgcgaaatccttgagcgcaagcagatcaacgttgtttccgcaatgctcgagcagtggtgcacgaacgtcatgcgatccaaggtcgagccaatgaaggaggtcgcgcgcatgatccgcaagcatttcgacggtatcgttgcatggacccagacgcgccagaccaatggcttcctggaggcgctcaacggcctgttccaagccgccaagcgcaaggcccgcggttatgtgagcttcaaaaccatgcgcaccgtgatcttcctgatcgccggaaagctcgacttctccgcgatcaacccgcatgccgcataacccactcatttttcaaaagagccatagagagctatctttcgattacaagacatagtcgggaagggcatatagtgcctcagcacgtgcggcgtcactcgtttctttcgcagcgaaggacatcccatggcagcctgggtagcgtactttttcaggagacgttgtaccgcgtccggactgagatgtccacctcgaacactcggaaatagcgcgtcgctgttgggtgtgcgaggctctttcatccaagcttttagaatagcggcggtctccttgctaaaaggggtaacgcgctgttttcgacctttacccataacatcaatgtgcgcgcctgcgccgagggtcacgtcctcgcgtgtgaggccggtcatttccgacacacgaagtcccgtctccacacccagtcggagtaacgcatgatcgcgacgaccacaccaggtgcgcttatcgggtgcagcgagcagcgccttgacttccggccgtgtcagaaagtgaatgagcctgcgatcgtagcgtttgttgggcatcgacagcacgcgctggatctgcgcggaatacgcgggcgtctcgaaggccgcgtaacggaagaacgagcgaatcgctgtcagtcgcagatttcgggtgcggacactgatagcccgggtcttctccagatcattcagaaatgctgtcacgagcggcgcattgatgtcctcaaatgccagatgatccggcggtttgtgcagacgcttgtaggcaaaacgaagcagcagcctgaacgtgtcccgataggaactgatggtgtgcggactggcctgccgttgttgcatgagacgttccgtaaagaaccgctgcactaatgatgggaaaccgacggtagatttcatgacatatccttccagcgacgctccaggcgcttcatcgcctgcttcatgagctctgggtgctgctcgacataccagtatgtatctctcgcccactggtgcccgaggaacgtcgacagcaccggtaaccaacgcaccgggtctttacccgaccggtctaatctcgccagcgtcgtgaccgcaaataaatggcgatagtcgatcaggcggggagcgcgctttgctgacgaatcgcgaagaccgatttcccgtgtgagcgccgtaaatgtatgagaaaccatgtctccactgagtggcttgccttgcgaagtgatgaacacatgggtttccgggcgccccgcaagacatcgcgcgcgacgtcgaagatagtctgcaagtgcatctcgagtggaggaatgaataggaacccacctcgactttccaaatttgcttccccgcaccgtcagtacgcattctttcaagtcaacgtcttcgagttccagattgaccgcttcgccggggcgcaaccccgtgacgcttagcagtcctatcagcgtaaaatatgtccaccgccgcagtcccgattccggaggaagagccagcgcggcagccaatatcttctgggtttcctcatcggtgtaaaggtagggagcacgccgatgataccggtgcggcaacaattcggcccgtggaatctctgtatgcggatcgaaggcactcagatagcgtgcaaagccacgcaccacacctaatcgctgagcccagatcaccggttgaaccgacggggacttttgtgcccaggtcaacgccagtgacgcgctgatgtgagaggcccgatgtcgttccataaagcagacgaagtcttccagacgttggcctgcttcatggagtttgaatcccagacgacgacgcatcgtcaggtattcttccattgatttgcgtaacgtactcatgatcgggggctcggccatggcggcgccaaggtccgcagtgaatccagatcgaccttcgcgtatattctcgtcgagtcgggacttttgtggcgcaagacttcgctaatctcggccagcgaggatccttgacgcagcatctgtgtcgctaacgcatgccggaattgatgggttcctttcctcaacgaatcgataccagcccgctctagagcgtatctgacaacattgcataccgctttttccgtcttgaacccacgaatcggcgcgtttatacgcaggaagacacttcgactctcagaatccgcgcgaccgtttttcaggtagtcggcgatcgcttcacccaccggcgcgagtaatggcaacggcgactcctgaccgccttttccgtgaatgttcaacgtgcccgtttcccaatcgatgtcatccaacgtcaaggaaaccacctcgccgctccgcaaccccagccgggcaaggaggagcagaatcgcataatctcggcggccgacggggcgacggcggtcgcaactggccaacgctcgcctagcatactcaggggatatcgctttggggattgatgccattgaccagtgggcgaccctggggatcgctgcagcgaggtcaagcttgatcaagccacgataacgcgcatactgcaaaaacgagcgcaagacctttgcgatcgattgcgctcgccctggactttgagtggcctcatgctgaacaaagtcgatgatctcgcgggcactgagatccgagagccgcgtcgccccatcaccgaattgctttgttaaaaacaaatgcgcacaccaccgatatttcctgatcgtcgtggctgccaagcctcgttcctggtgcagatacaaagagtatccgtttaccaatttttcaactggtgtctgcgcaccggacgcttcctttgctacgattccattttcttgaagcaattgtacaaagcgtcttaccgcatatctcgcgccgttccgatgacagcggtggtgttctcggtagcgcagataacgttgcgcagtttcatgagtcacttcctcgatcaacattttcttgcacttgagccacacgctgaaatcggcaacgagaagcaagtgtctgcgaatagactcctgcgcgtaaccttgatcattcagcagaccttcaaatgcaccgaggtgttcagcaagggggccctcgggtgtatcgagtgagtgcgaccgcgttttttggtacaacttctccatgaccttcgcctcttgtaaaagcgggtctaacatcaatcagactatgccgatcatccttcgttcattgccttgaatttgcggctcgccacgtccaaatcgaacatagttaactacgcggcatagttgcgaaacttagaggatcgaatcaccagtccctctggggtgatgtcttcgtagcgtaggccgatggcttccgatacccttagcccggtgcaagcaagtaatgcgaacagtgtgctgtaggtatatcgccgcaacgtttcacgccccgactgggaggctgcctgaacgaggtggcggacctcgtccgtggaaaagatataagggataggtcgaatccgttggctgctgccgaagacgggcggaggcacttcatggcgagaatcttcggcccgtgcgtaccgagcaaatcgaatcacctcaccgagtcggcgagctcgtcgaggtgccaagcgtgccaatccagcccattcgatggcggtatcggcgcacacgtgggatttaccccttgcgtctgagtaggcggcgaagctgcgcaacagattgccctgcgacttaagttcaaatccacaggcacggcgcacttccagatatgactgcacggtttgctttaacatggcagttcctccggccatggttgggcaatctgccgcaacgcggcgatgtccacttttgcataaatttgcgtagtcgcgacagattgatgccgtagaacggccgcaatatcctgcagggacgcaccttgccccaacatcgacgttgcaaccgaatggcgcagcacatgggcggcgcctcggctcgagcagacaacaccagctcggcgcattgccttcttaacgatgatggagatggcagcatgatttgcaaaggcttgaaacggggcacacgcgcggacgaataccgtatcggtatcggttcgaggccgtccctgtcgaagataatccacaatggcctgcccgacttcctgtgtcagaggcaggagtgtctgccgcccgtttttgcctgagaccgagatcgaggcatctttccaatcgatatccccgatgcgcagatgccaaatatcgccggcgcgaagccccaaacgcgccagcagcagcaaaattgcacggtccctctgaccgactggcgacgctgtgtcacatgaagcgatgacgcgttcgacttcgtcgagttgcaaatatcgcggcagcgttgacaggctccaatgtgccaagacgggtatcgctgcctccagaccggcagcgcacttgccttcggctatcagaaaccgaacgagcatgcgtaatgccgtcgtgcagtgctttgccgccgcccatcccttcttcatgctttgctcaaggatgaactggcgcaagtccattgcattcagtttgccgaggtcatcccctcgtctgaatagatctcgaagcgcaataccgtggttgtacaaagtggcatcactggttccacgctgttggcgcatccattggcagaatgcgaagaactgaactgattccaggtccgctgcaagcgcagtaaaaccgattgcccgggtgctgattcccccttggtacgtcaggaacatccgcgcaccccgtaacgatacgatgcgccgctgatgcccaaagccctggcattggcatcgactcaaatgttcagcgaaacgttcaagagtcaattcgttaaaactgggaagcggtatgccttcccgattcgcccaacacaggaagtgcgatgccgcagcaatacgggtgcaaatagaactcttcgcgtaaccgagctgctccaggtattgagagaagccttcaagcagcgggccgcctgggcgagagagaagcagttgaacgtgcgaaggggatttgaagtactgactaagcatgacgtcctccttgagcagaagtctccagtcgagtggccagaaagacgtcaatattatgcggagcaatgccgagcaaacgcgatactcgatctgctttgagagaagtccagttacatccgcttcggtgaactactccgcattaaaatacactctgcgttagagctgtaacgcggtgcacggcgttacagctccgtggtgtcttggatgcatagcaccacttcgcaagctcgcattcgctcggctgagctctgccagtggggagccagaatatcgcgccagtccagttcatcctgagccaggaagcggtatgccgcagccgtttccgcccagccgccgcatgcgctggggatgcttgccgtcggcttctctgcgagccgctccgctagcagcaccgcccgcttgttcaggcgctggtcgcccaagtcaatgtccttgaattctgccgctgcccaactcgttgcctctcgcttcatgtgccgcccaaaatgcaagagtgaacgacaatccgaaagagtttacaaccccacccgctatgtcattgaccgtaaacgacttttcgcggcacaccatgggtcacgacttgtgtgtaatggggtgcctcgaaggatcgtctgcctgcgcaagggcagagaaagttaaattctatcaactcaatctggaggatgcggatctaatcagtcgaaaacaacgggtgctgttcgtcgatgcctcaaaggacgcgacattagacagctttcgcttgtatagggcggagccgaagatggatttcagttttacctcgcatgggcgttgttgcacaaatcgaatttgaaggcggagttacccctgagtggcgaaattcaagcaatacggacggactgcgggcgggcaagctcattcatgtggttgagcacgcccgcgcggattgccacctcggtcgcctgggagcctaccttgcgcgcccacagagaatgaccggtgagtgtcttgagtcgatacatcaggttctcgaccagcgagcgacggtggtacccgctgtcctttttccattcgcgtctgctgctcgttgcaatggcgtcgatggccgcattgcgccatgccgcaccgggcgtggtttcaggccacggcatcgcgccctcgcgcggcggaatcgacggttgcgcgcctgtggcggcaatcactgcatggcacgacttggtgtcgtacgcgccatcaccgcgaacgatgtccacgagcgtgtcgggcggcaactggtcgagcaaatcaggcaacacgtcggcatcgccgacgtcctgatgggtcatcaacgccgcgcatatctggccgctcttggcgtccatcgccagatggactttgcgccacgtgcgacgcttggaatacccgtgcttgcgcaccttccactcgccctcgccaatacgcgcaagagagaaaaaatggacatcagccagagccctgcaaatactagaatcagcagactaccgggtgtccatagagtcagcagaaaaaaatggacacaacgaccgtcagaatgtccatttccagtcgcaagtttcgcagctgatttcgagtgaagatgcacgccgcaatctagcgtagctgcaagggcaggacgctaccgccacgcagcgcggccagttccttgcgcaggcggaacacctgatggagcagggcaagttcacgagccagcgattcgtcaagctgtgcctgcagatccttcgcgtcgccctttgcgcggttcagacgctcggtgagttcgagcttcgggcgcccggccactgcattggccgcgtcgatcgctgcgatcagttcggtgaactgtgggcgcgacttcttgatgctgcccttcttgcggcccgcctcgatcgccacggtgtcgttgttgatacgcgcacccttgcggttcttcagccgctcaagagcggcatagtagtcggtcatggcgccgctcatgctgcctccgatttgatcagtttctcctgcgcgtcaagcagtcgttgcagcgcctgcgcctcgatacggtattcgacgctcgtctcatcgaccgcgcgcagcttcgcgaccgtaacctgctgcgcgttgatcacgcgacgaagcttcgatggcacgaccacgaggttacggcagtccgattcaagacaatccagacgcatccagtcgagtggcgtcgacttgcactgctcgacactggcgcagccgcccagcaccgtctcgcggtacgcgagctcgcccttcacgaacatcctcatcgtctgctcgcgtgagtagaccgacacaggcgaggcctgcacggcacggctctgcgtccacgctgcgtggccgccgaacagccgcacgtcagagaacagcacctgctcggcgtacgcaaggtactcggacaggccctgtgccccggcccattcgttcgcgaagtgggtcctatcagtgtcgatgaagcccttcgcgaatgccgagccacgagcgtagtacatgctcatctcctgcgtgatgtgctgcagctgacgtttgagcgtcggcagcgtcaccagtccgctgcggtgcgcgtataacgcgagcgtcctccgaagctggtgccgcgtgaacggccactgccgcccgaccgcgtacttcggctcgtcttcccacgcgcggtgcatgtcgacacgctttagttcagcgatgtcctcgaccgtgatcgtcgggaaaacgcgctcacgaaaggcttcgatatcgttatgaacggtactcgccgcccggtttgctacgtatcccatatgcagtcccatccggcagaacagcaggtgcgaaccgtccgtcgattcggcgtagccctgcgcgccgtgtgcacggtgtgcctctcccgatagccgttgtgcgagcccgacagcacgggcggcgagcgggctggtcacccagcgtgcgcgcctgggacgcccgcccgacagcttggtcgtgatgccctcgatggtgtagtgggttacgccatccagacgggtctcgctcaggcagtcgtatgggaggctctctgcttctgtcgcacgcatgccggtgaacgacaggatgacaagctggcatagcgccctgatcgacgccacaagcgacgacgcgacgtaagggactgccttgtacccgaagtgtgcagctacccttaccagttctgaagggacggacggactctcgccggcatacagtcgtgcgaggtagtctgacagcacgtcgacgatcccttcagcgacgccgaggtcatgttcacaggccaacaggaagtgctggtagatccgcgtcgggacgacagggtgttgtgagtttccagcacgttgcgcgaagcgttcgagcagaggcttgtgcagttgtgccagtggtacgcgcagccctgtggtcccgacgcccagacggtgaagcttcaccagaactgaatgaaggcgctgggccttcctctccatcccgggttgcgccacatagtcgaggacaatagcgacgctggacagcccctcgtagagagtaagctcacgttcggcggcaaagaacgcgaatcccttcaggcaggctgagccagagttaagcgtactggacgccggtaccgtgtcggtcgcttcgtgcatcagaaagtagatcacctgcttccactgtcgcgtagtcgcttctgaaagggctcgacttgcgccgtcaggcaggtggcccctgaagtagatatgggtgcgcggcccaatcgtatatgcccggatgtcccaggcagcgtcactaaacagcgaaacagcgttcgcagccttgtcgcgcgtagccactgtatcgtcctcgacacgataccagtcggggcgctcagcgatcggcgcgatcagcgtgttgttcatgccacccccaattcgtaaagctggtcgagcttggccgaccagaaagcgtccagattcccatcgacatcaacgtcctgctcgatctgatcgaccagcgcggcgtcgcgcttacgcagttcatccagcaggaagtcaatgcggcgcagcaccgcgccgaacgaactgtcgtattgctcgatcgagtcggcacgtccgctcacgagcctgacgcaatgacggcagcccagcagcttgtggatgtcggcggcgtcagcgtgcacgcgatactggtcgcagaagagacatccttcggtcgagcggcagtccggcttcacggtggctgaagcggcgatcggcactggcttgcggaattcgatgcagacgcccaccgcgctcctgatgctgccagccgggtcgtcgccggtcttcagcacagccttctcgaccgaagcgaggaacacgcccatctcagccttgtgcgcggcgtccgtgccgttcgagtacgaacgcaacgctgtttccaccgagtgccccatcagcctggctgcgatgacagggccgtggttacttaccgcccaatcctgctttgccgcacgccactgacgtgcgctaatgcgcggcagcacgatcccgagcgtgtcgagtcgatcataaagaagggtcagaaattgggttgggagaggcatgggccgtcgtcgctgcgggctatgtccgactacgatgaacaacgcgtcgcagcctgcgtcctgcaccagatactcgcgcaatgcgagatacgccttgagcttcggcatgaagcccagcgagacggtgaacgtaatctctttagcccctgcacgatacttgacctcgcgaaacttctgacgcacaaccgacgcatcctgcaggctcgcggcaagctccagactccacttcatggccagcagctgtgcgaggttgacgcccgtttcggccagaaacagcgcggcaaagcaaaagacggccatcgaagcgtgtgagcgccggatctctgactgcgcgtcctcgttcgccgccgcaagatgtttagccgcacttctggcgatgtcccccgaacgcttagaagggttcttggcttcagcctcagccatgcgcatcgtgagttcttcccgggtgcgcggctctcccgtttccagattccagccagccaggccgtgagagccgtcgcctccgcgacgatggtgtctgcgcggaacaaggcaaagactctcaccgcgcgctgtggtcacgtgtaccgggtacggcttgaagtcgagcaccagcgtgctgataccgctgaagagcgcgtcagcccacgcgagcagggtggcctgggcttcggcgtcaggcaccgccgtcggcaccgaagcatcccgttggcggcccagcaccctcgcgtcggcgcagaagtcgtcgtttcggaataactcacgtagcatcgacaacagacggcgctgactgatgtcgacggaattgcgcttcaggttgcccagcgagacctgttcgcgcctctcacggaagtagcgatgaaccgcttccgccgtagtcttctcgtcacagagcacctgatgcaagccctgcctgtcggcccagttaacgaactcaagcacgacgcgcaaagcaccgtcgaccgtccttggacgcatcgcgccaagggtcatgcgcccggaaagctgcgtcaccagcaggcgtacgaccctggcgcgttcactgctgaagcttgtggggtcgaaagtgcgtcgcgtacaccgcaggctcgacgcgtcacgcttcaagtagcaaatctgcccgatatcggaacgtccgctcatgccttcccacctgagcagcgcgcgctcgggatgtagcagtgttgtaccctccgcgagcggcatgcgcacttcttcgtactggcggctcatgcagccaccgccgtgtcaagggtgcgcgcgaccagcgtcgacaggtgcacgccccagccatcctggacagcgtcgaacagcttgcaattctcgcggtaaccgaggtagcgcaaatgtgctgcagcacatttgcgctattaccggccgtagatctttatgtagagtagcaacgtcaaacgcttcgtgaagcaaggcgtcttgtttgaactactgcacataaagtttcatgatgggctcctggcggccatcgggatcgcctttgtgaggagttcgatcatggagaagtcaacccgtcaagtttcaagccacctgccgttgcagcagttcgtcgctggcgccgtgagcgagctggagaggctaggctacagcaggaaatcgctttggcgctatcgcgtcgcctggcgtcatctcattgagttttgtcatgagatgagcctgggcgataagtactccctggagctggcgaaacggttttgctctacgtatcaagttcgtgctgacgaatgcctgaactctggccaggggtggcggcggaatatcgtgtttgccctcaaggttctcgatggctttgcgcatgaggggcatattgtgcgcaccgtcaccgatatcaagacgatacaagttcccgaacccatgagcacggcattgcgcgactatgaactgtactgccgggatcgccgtcatcttcgtacaacgacccttcgcgcgcggatgcgggtgatagcgttattcgcggatttccttggttcaaggaacatcacgttttttgatcaggtgcagccggccgatctctgcgcatttgtgaccgcgcaacatcgtctgtcggcgaagtcagtctcgcgcatcgtttccgatgtgcgttgctttctgcgctttcttctcatgcgaggaattctgcagcaggatctcagccatgtattgccggtggtccacgttccacgcgatgcgactattccatcggtctgggacccggaagtcctgaccaagctgctcgaagccgttgatagaacctcacccaaaggcaagcgcgattacgccatctttctgcttgcctgtcgcctcggattgagagtgggcgatattcgcgcactctccctcgacgatctgaagtgggaaacggccacaatagaggttaggcagtcgaagaccctcacacctctttgtttgccattgacggaggaagttggcgaagcgctgattgactatctgagatcgggccgtcctcaatcggatcatcgagaagtgttcctcacgttgaacgctcccttcctacccttccgcgaggccgacagcctatattggatcgtccgtcattggaaggccatcgcggggattcacttcaggactccacaacgccatggtttgcactctctacgccacacactcgcgacacgattgctccatgaacagacgccgtttcaagtcatcagcgacatcctggggcatgcgacgacagcctcgacgttgatctacgcgaagaccgacgtggaaaccctgcgcactgccgcgttgaacaccgagaagatgcgccatgtctagtagcaaattcaaggggcatttccagagcgctgtcggcccactcatggaacagttcgtccaggagaaacaggcctgtgggtaccgatataatgcgcaagcccgcttgctggcatgctttgaccgcttcctgagcgatgaagcgctatcggcatgcgagctaccgcgctcaatcagccgaaagtggaccgccaagcggccccacgagagcaagagcacccacgatcagcgtatcggcgcagttcgccaatttgccctgttcatgtgccggctggggtatgccgctgatgtgccggatcggtccctgacggcaaggcgtacgagcagcttctctccgcgcatcctgacccacgctgagattcagcggctgttccgcgcggctgaccagctcacgccgaccgcactttcgccaatgcggcatctcgttatgccggaagtattgcgactactgtatggctgcggcctgagggtgggcgaggtgcttcacctgcgcgtggccgatgtggacctcgaacggggaatcctgacggtgcgtgatggcaaatttcgaaaggacaggctcgtgccaccagccttgcccctggtacagcgccttcgagtctacgcacaagtcatgggcgatcgcccgtccgatgcctacttcttcccttcgccatcagacggcccgttgagccactcgtccatctactggctgtaccgggagctgctgttgcgctctgggatcccgcacgccggtagaggcaagggtccgcgcgtacatgatctacgccacgcgtatgccgtgcatgcgttgcttcggtggtgccaggatggagctgacctcgatgcgaagctcccggtactggcgacctacatgggacatcagtccctagccggaacgcagcgctacctgcatctgattgccgaactgtttccggagatcacggcacgtaccggcgccgcctttggtgatgtcatcccgcggaggaacggatcatgaaaccgacggatttctccatgctcgtgaccagcttcctgacgcaccatctggccgcacagcgcaacctgagccccaacacgatcaaggcctatcgcgacgtgttcaccctgctgctgcgatactgtcgtgacgtgcggggaatcgcactggagcgtctgtctctggcacagatcgacgtaggcctggtcgaggcattccttgatcacctggccaacgaccggcatgtttcggtcagcacgcagaatcatcgcctcgcggcattgcacgcgttcttccgctacgtacagtcggaagtacccgagcgcctgctgcagtgtcagcaggtcctcgcgattccgctgcggcgacagccgcgcgccagcgtcggttatctccccaaggaataccttgcacagcttctcgcacaaccggacctgcgtacgtctgagggctgccgcgatgcagtgatgttgagcgtactctatgacaccggcgcccgggtacaggagttgattgacctgaacgccggggacgtgcggctggatcctccagcgcaggtgcggctcatgggaaagggtcgaaagccgcgcgccgtgcccttgatggactcgacagtcgaactgctgctccagtatcgacgcgataatcacctcgatcgtcctgaatacgccgacaagccactcttccagaaccggcaaggtacacggttatcgcgctcgggtgttcgctatctcctgcaaaagtatgtgattcccgtacggcgaagtcaccccgacttcacgcagcgggtaagtcctcacagtttgaggcacaccaagggaatgcacctgctgcagagtggcgtaccgctcgagatcatccgcgacttcctcggtcacgtcgatgtgaagacaaccgagatttatgctcgcgcaaatcttgagatgaagcgcaaggccctcgaaaaagccaccgacggtgcgtcgcttccaaagatcccgtcctggcagcagaacaaagcgcttctcgagtggctgcattcactgtaggactgcggaggttgcgcacgctgtttgttggctgcgggcctccccatcttgcccaacttttatgtagagtttctacgagcggagacctttgctatcgcggggctggatccgatactgcacataaaaactttcggccggtaatagcgctcggtcgtagacggttgtacgtgccacatcaactgccgcaactgatcgagcgcccgcgtgtacttcgtctcattcgctgtcatcgtgtcgaccatgttcagcccgtaggtcgcgcgcagatcgtggaaactgaactcgtacctggggttgccaagctgcacgcgcatcatgggtaacagttcgtccctgatgaactggcgcacggcctgccctgtcttgacgtggcggcgtacctgcgggccagtgctgaccgggcggcgcgacgcgcgatcctcgtagagcggcgcaccgcgatagctgagaaagagcggctggacgggatgatcgccgccgtctgccagctggcgacgcttgcgcgcgcgatcgctgtgcacataggtgtagagccgttcatagaaactgcgcggcaggtgcagcacgcccttgaccccgcccttcgtgtcgatgcccgtacccggcccgcaggcgagacggatgtcgtcgccgtgaaactcgcccggtttgcgcatcacgtgtctcgcgcgcacggtcagtaccgtctgaatgcgagcgcccgtcaacagcgcgaacagatgaacgagcgtcatctcggtattgccgagagtggccaacgattcaagcagcaccgactgctcggcagagggcagcgggcgcaagcgaccaccgtcctggatgtgatcgtcccacgggtcatctgcgcgccggccactgatcgacaggtcggtggtcttgacctcgatcgcgcggctgaagcccttatggtctctgaactcgatgaagcggccagattcggcccacggcgcgttcgcgggcctgaagcctgcctcggtcatgagccagcgataaaagcgcactacggcgcccatacgacgcctggcgacgcccggagacagttcgcctgcctgcacggccagcctgatcgaggcactgtagcggtaggttggacgttgccgcttgttcgcgggaaatgccagccagtcaacgccctcgttatccagataacgacggaacgccaccaggtcgtcagcaatgctggcgaacgtcagcatgttgggcgacggcttcgactcaatcatgtcgatgagccacaggttcgcctcagcccacggtgcgccgtcagcgagccggacaacaggaaagagaggaaaggtgcctgtgatccactgcgggcggtcgtcgcgccgcttgccggtgtcagggtctgcgagtgggaccgtgtgatagatcgtgccgccctcgggcgtggtaatgctgaccggcgtcgcgccggatgtgttgcggtcaacgacctcggtcaacggcagatgccggatggtcgttcgtcttgctgtcatcgcccagatcctcatgctgtgtttgagtgggcgtcctcattaacacaacgtgcgagtatcaagaaatcgttcctggcttgcgcatacgccaaataccttcaggccggtgctgtcgacgaccagatgcagcgactgactggcgcgctgcaccggcagcaccacgttcagatcctgtgcgcgacggctcagggtcgagtagttcggcaccggcaaatcggcgaaggcaagcttgcgcaggctcatggcaaagccttgcagcgcgcgcaacggcaggcggaacacttgcttgaggccaagcagcatctgaatgacagcatccgaatagacgcacgggcggccgcgcttggatacacccacgccgggcgacgccaacacgctttggtctatccacatcgtgacgtctccccttgcaatcagaccggcgttgtattgcgcccagttcttgacgcgataggtgcccttgggctcggcttgcttctgtgtgtccctgcgcatcttcccggcaaaagacgagaatctacgcacccggcccgattgtttacagcgctatctgctcagaccgttgcgcgtaaacgtcaactcgccgtgcgccgggcggatttgtgcaacaacgcccctcgcatgccatgtcgatcgaaacttgcatggcaacctgttggtagtgttttggaaagctacctgaagtccatgtgctggccattaggggctacgaatgggagttgcaaatcggcttgacagagcacgccaaaaataatctccattctgcaacaagttacttcgattacgctgcaacgcggcgttaatgggatggacgcccctacccctaacggtatcgatatgccaaagtgggagcgcatagcaaccccttgacacaagcaggagcgttcaccatgaagacttgttgacggcggtctaatcgcgacagtaaacggcggcgcaaggttggtaaaagcgtcaacagcaaggggcctagagcggccccttgctgttcgggttggcgaatcctgatcagaacggttcgtccatgtcgtcggggggatggtccgagcagggcgaacgctcgtcgcgcagcaggtcctctagtccgaactttgacttcccaaatagccggaacccacctcggcgctgggtttcggctatttttgagactattatgtaaccatgtaagttagtattgatatattgcgggtcagtagttttgtgcttgaataagtgttcatgtatatcgaacacgtcccgaaccgcaactcgccccccgccatcctgccgcgcgagtcctatcgcgacggcaacacggtcaagaggcgcaccctcgccaatctctcgtcgctgcctgccgaggtcattgaaggcttgaaggtgctgctacgcggtggcgtcgcggtgtcgtccgccgatgaggccttcgtgatcgagcgcagcctgccacacggacacgtggccgccgtgcttggcgcggcgcgcgcctgcggcgccgagcagtggtttgcatcggcaccggccgcgctgcgctcggtggtgatcacaggaaggttgattccacctcgtatttcgccggcttcacggacttgccttgcatctcgtcgcgcttgtccacgcccgtgtagcccgcatcaccaaatgcatggtcttcgtggccatgcagcaaggcatgcgcctgcgatacatccgagtcgttcgctgctgtgcccaccacgctgtgcactagcccagaagccgcatccacgccgaggtgggccgtcatgccaaagtgccatgcattacccttcttggcctggtgcatctccgggtcgcggctcttctccgttcttggtcgagggtggcgcctcgataatggtggcatcgacaatcgtgccttccttcatcatcagcccccgctcgcacagcatgatgccgatctcttcgaacagctttcgcgtcagttcatgctcgacgagcaggcggcgaaacttcagcagcgtggtcgcgtctggcaccgcttcgacggccaggtcgatcccggcaaaggcccgcatcgccatgctgtcgtacagcgcgtcttccagcgcctcgtccgacagcccataccactgctgaaggaagtaaatgcgcagcatccgctccagtccgatcggtggccgctcacgtttgcccttggggtagtacggctcgaccgccgcaatcaggcccgaccacggcaccacgcttaccatctccgtcaggaagcgctggcggcgcgtcacccgcttcttgccgtggccttccgcttccacaaaactgatctgtcgcttcatctccggctcatctcttgggcgtgcgcatgacaacgcttacaagccactcatcaatgaatgcccgcgctaaatcagtttttccttagtggtgaggtcaggtaacgtgccaacgtccgccgcagcgatcaatcggccggctgtagcttgtgcgccagagcggacatgctccataccaggatgaacgtgcccatgatgaccagtccggccaggccgaattcgtcgttcgccttgcccaattgcagccagaaggcactgcccgattcgaggcgggccgccacgcctgtcacctgtacgacaccaaccacgatcgcgatgatcaccgacaggaacgtgacactcatgttgtagtacagcttgcggacgggctggtccagcgcccagccgtacgcaccgagcatcaggatgccgtcggtcgtatcgaccagcgccatgccggcggcaaacagcagcgggaacagcaggatcgatgcgaggggcaggtccttcgacgcctccgtcgcggcaatgccgagcaggccgatctccgtggcggtatcgaaaccgagcccgaacagcaagccaagcggatacatgtgccagctgcgcgtgaccatccggaacatcggccggtacaggcgcgccagcaggccgcggccattgagcaggcggtccggctcctcggcggcgccggccttgccggtgtgcaactgccaccaggtccggcacagcgagcgcagcaccacgaggttcatcagggcgatggcaatcaggaagccggccgacacccctataccgatcatgccgccgatttcgcggaacggaccggtgcgctggtgcagcgcggaggccgccatgacgatcgcgatggagccgaacagcacgaccgtcgaatgccccagcgagaacatgaagcccaccgccaacggtgtcttgtgctcctgcatcaatttgcgcgcgacgttgtcgatggcggcgaggtggtccgtatcgacggcatggcgcaggcccagcgtgtaggccagcagcgcggtccccagcagcatcgggttgcggtgaaaggcgaagatggccaggccccaggcgccaacgttgactgccagcaggaccgcgtagatgtcccgtgtcctggaccgcgcgtcgacctgggagtcgtctagcaggcatgacaggattggtctcatagggggggccttattaccgtggcaattcccttaagttaggcgcttttgccccaaccttcgacgcggatattgcgatgcagcatggcggcccgctgcaggcgggacacggttgcaccgtggctccccggatcgagatcgctgtcctatactcgtgaggtatttataggcccatcacggtgggcaagagttactgtccccgcagcaaacgtgactttctgcgccatggttggcggcgcttcgctcgcttgctggatccgtggatgccgtgcatcgatcccacgggtcattgagagtcaaagaacgcggtcagcagtgcgaggcagatcatggcagaacaggccgttccctatgggcgcaagactcagcacacgcccgccctcaaggaagtccatatcctctggatcaccgccggtcttggctgcgacggcgattccgtttccattacggcagcaagccagcccagcgtcgaggacgtggtgcttggcgcgattcccggcctgccgaaggtgcatctgcataacccggtcctggcctatgaaaacggcgacgaattcatggcgccgttccacaaggccgcccgcggcgaaatcgataacttcgtgctggtgcttgaagggtccattcccaatgagcgcatcaacggcgagggctattgggcggcgatgggcaccgacccccagacccaccagcccatcacgattcccgaatggctggaccggctcgcgcccaaggcgctggccgtggtgggggcgggcacttgcgccacctatggcggcatccacgccatggaaggcaatccaaccggctgcatgggcctggcggactacctcggctggcagtggaaatcccgtgccggcctgcccatcgtgaacgtcccgggctgccccgtgcagcctgataacttcatggaaacgctgctgtacctcttgtaccagctggcgggcctcgcgccgatgatcccgctggacgaggcgctgcgcccgaaatggctcttcacgcgcaccgtgcacgatggctgcgatcgcgccggctcgtacgagcaggccatcttcgccaccgagtacggcaacccgaactgcattgtcaagcttggctgctgggggccggtggtgcaatgcaacgtaccaaagcggggctggatcgccggcgtcggcgggtgtcccaacgtgggcgggatctgcatcggctgcaccatgccgggcttcccggacaagttcatgccgttcatggatgcgccgcctggagccgtgctgtcgtcgaacctgatcaagagctacggcccgctgattcgcagcctgcgcaagctgaccaaggacacgctcaacgatgagccgaagtggcggcacaaccagccagttctcactaccggctaccgcggataagcggcgggaacgcgcattctaagatttggaggtggtcatggccacaatcgctgctcctggtgccaggccgcgcgcccaagccgcgccgggcaagctggtcgagatgaactgggatccgatcacccggatcgtcggcagcctcggcatctataccaagattgatttcgagaaccgccgcgtggccgaatgctacagcacgtcgtccatcttccgcggctacagcatcttcatgaagggcaaggatccgcgcgattcccacttcatcaccagccgcatctgcggcatctgcggcgacaaccacgccacctgctcggtctacgcgcagaacatggcctatggggtgaagccgccgcccatcgcggattggatcatcaacctgggcgaggcggccgaatacatgttcgaccacaacatctttcaggacaacctggtcggcgtggatttctgcgagcaaatggtccgcgagaccaaccccggcgtgtgggagaaggcgaagaccgcagaggcgccgcacgcggccgagcatggctatcgcactattgcggacatcatgacggcgctcaacccgtttaccggggagttctaccgcgagacattgctggtcagccggtatacgcgcgagatgttctgcctgatggaaggacgccacgtgcacccgtccacgctctatcccggcggggtgggcaccgtgccgaccatccagctgtttaccgactacatcacgcgcctgatgaagtacgttgaattcatgaaaaaggtggtgccgctgcacgacgacctgttcgacttcttctatgaagcactgccgggctacgaggaggtgggccggcgccgaatcctgctcggctgctggggatcgttccaggatccgaacgtctgcgactacaactaccgcaccatgaccaaatgggggcgcgggatgttcgtcacgcccggcgtggtggtcgacggcgaactcctcacgacggacctggtcgacatcaaccttaatatccgcatcctgctcggcagttcgttttaccaggactgggatcatgaggaaacctccgtcaagaacgacccgctcggtaacgcggtggaccgcaagcacccgtggaaccagaccacgctgccgcgcccgcagaagcgcaacttcggcggcaactacacctgggtgatgtcgccgcggtggctggacaagcgcaccggcgaccatctcgcgctggataccggcggcgggccgatcgcgcggctatgggccaccgcgctggcggggctggtcgatatcggatacatcaagtccaccggccacagtgtcaagatctacctgccgaggaccgcgcttaagccggaagccgagttcgagtggaagatcccgatgtggagcaacgccatcgagcgcgatcgggctcgcacctacttccaggcttactcggcggcggctgcgctgtacttcgcggaacaggccctggccgagctgcatgcaggccgcacccgcacgttcaccgatttcaaggtgcccgacgaggcaatcggctgcggcttccatgaggcggtacgcggcgtgctctcgcaccacctggtcatccgcgacggcaagatcgccaattatcatccgtatccgccgaccccatggaacgcgagcccgcgcgacatctacggcacgcccggtccctacgaggacgcggtgcagaacacgccgatcttcgaagagaacgggcccgagaagttcaagggtatcgacatcatgcgcgcggtgcgcagcttcgacccttgcctgccgtgtggcgtgcatatgtacgtgggcaacggcaagaccatcgagcagtcgcattctccgaccttcggcgtgatggcgggggcgcactgatgagcggtgcccgcacggtccaggcgcagcagcagcgcatcgaggcgatgatcgcggcactggagagcgtggacgacaaccaggccagcgcactcgcgagggaactgctgcgggtggtgcttgatctgcatgcgggcgggctcgcgcgggtgatggagatcgtttccatggcgggcatccaggacaatccggtcgtcgaagcactggtacgggaccctgcagtctgcgcactgctcaacctgcacggcctgcatccgcacgacctgcccacacgcgtggcgcgcgcggtggagcacatgcgggccgcgctgggcacccagggcgtgacgatcgaactgcgcgatgccgccgaggaagccgtgcgcgtgcaggtgtcagggcggctgcaaggcaagcacgcgtcgcccgagtcgctgcggcaagagatcgagcaggccatcttcgagcaggcgccggaagtggtgcgtgtcgagatcgccggattggccgacatcgacgtgcacgaactgcgctttgtcccggccagggagatgcgcggcccggacaggcaaggccgggtcgggggtggccagccatgagcgcgggaccgttccccgaggcgcggaccggcgtacaggggtgcggcggctgggtggcgcgcctgcgccagttcacgcgcaaggccgactacgcgcaatgcgagctgtgcggcgcgtccatcgtcgcggaccatgcccatctgttcgacaccacgcggcgccaattgcactgctgctgccgggcatgcgcgctgctgttcggcagccagcagggatcccgctatcgcccggtgccacgagcaggccgctatctggatgggttccggatgagcgacgcacagtgggacgcgctggcgatccccatcgacgtggcgttcttcttcgttgactcgggggccgcgcacgtcgtcgcgctctatccggggccggccggtggcacgcgctcgcagctcggcctggcggcctgggacgacctcgttgccgacaatcccgacctcacgcgcatgcgtcccgacgtggaagcgctgctcgtctatcgcgcgcaaggcgccagggactatttcctcgcgcccatcgaccagtgctatgcgctgaccgggctgatccgcgcgcgctggcgcggcctgtcggggggcaagccggcgtgggaggcgatccggggcttcgttgccgcgctcaaggcaacgggccgcgtgccggagggcctgctccatgcctgacctaacgttcagcatcagcgcggccgaggtggcgccgttcgccgccgtgccgctgctgctgttcaagctgcagatcgcgaacgcgcccgccggcgaggagatcgccagcatcacgctgcaatgccagatccagatcgaggcgacccggcgccgctatgcgcccgccgagcacgatggcctgcaagacctgttcggcgtgccgcaacgctggacgcagaccctgcgcacgatgctgtggacgcatgcaaccgtgatcgtgccagcgttctcgggcacctgcgtcatcgacctgctcgtgccgtgcagcttcgacttcaacatcgcggcgaccaagtactgccatgcgctgcaggacggcgagatcccgctaatgctgcagttcagcggcaccgtcttctatcgcaacgcggacgacgcgctgcaggcggcgcccgtgccctggcacaaagaggccgcgttccggctgccggtggcggtgtggcacgacatgatggcgcgctattacccgaacggcgcctggctgtgcctgcagcgcgaagtcttcgaccggctcggccgctacaaggcgcagcagggcctggcgacctgggagcgggcgctggacgcgctgctcgacggcgccgaggagaaggcatcgtgaaccaggtcgacagcgtgatccaggcggtgctctacgagggctacatgctgtatccctaccgggcgtcggcggtcaagaaccgccagcgctggacgttcggcggcgtctatccgcgcgcgtattcggtggcgtcgggcagcgatccctggatgacgcagaccgaatgcctgctgtgcggcgacgccgatgcacgtgtcacggtggcacccgggttcctgcaggtcgccgaccggaccgtgctggccgcgtcggaggacctctcggaaggcggcaccggaaacacaactccgtggcgggtggtgccggtgctggacgtcgacgatcgccgctttcatccgtggcaggaagccgtcgagcggcggcttgcgctgccgtccatgcggctgggcgagctgctggatgcgtctcggatcgaaccgttcgcctttgccgggagcgccgagatcgagttgctggccgatcgcgaaggcgtggcacgcggcgcgctgcgccgcacgcatgccgcgctcgtcggccatgtgggggtgggcgccgagcgggtcgatgaccgcgtgtgcaggctcaccgcccgcatcgtcaacctgacgccgctggcggacgcaggggcgctcacgcgggacgccgcgtcggtgtatgcgctggtatcgtgccacatggtactgtccctggagcaaggctggttcctgtcgtcgatggatccgcctcgcgcgctcgccgaggcgtcggcagcgtgccgcaacatcggcacatggcccgtgctggtcggtcaggacggggaagagggcgagggcgggcatcgcacgatgctggcgtcgccgatcatcctctacgatttcccgcagatcgcgcccgagagtgccggcgacctgttcgacgccaccgagatcgacgaaatcctgacgctgcgcatcctcgccatgaccgacgacgagaagcgcgagatggccgccaccgacgagcgcgcgcgcgcgctgctggcgcgcaccgagcagctcgggacgcagcagttgcagaagctgcacggcgccatgcgccacatccgcgggggcgcggaattgaccgaggtgccggacctgtccggcgatcccggcgcgctgaacgaatccggcacgccttcttcgccatgggctggccttgatgcaggcccgcgcctggcctgcctgcgggtcggtggcatggagattcgggtgggcgaccacgttcggctccggccgcgctcgcgtgcggacatcttcgacatggccctgaacggccagttggccaccatcgaatccatcgagcgcgatctcgaagatcgcgtgcacgtggccgtgaccgtcgactgtgaccccggcaaggactttgggctcgcgcgcatgccgggacatcgcttcttcttccgcccggacgagatagagccgctgggcggtgcggaggcacaggcatgagcggcatcctggtcgcgggcatcggcaatgtattcctcggcgacgacggctttggggtcgaagtggtgcagcgcctcggcgcccgccaggccgcgcatgccttgccgccgtttcccgaaggcgtagtggtggccgacttcggcatccgcggcatcgacctgtgctacgcgttgctcgacggggtggacgccgccatcctggtcgatgccacgcaacgcggcggggcgcccggcagcctctatgtgatcgagttgccgatggacgcgcaggacggcgacggcgctggcgatccgtacgcgtcacctgtgctgatgtcgccgcatgagatgaatccggccctcgtgctgcgggcgctgcggatgatgggcggcacttgcgcggacgttgtggtgatcggctgcgagcccgccgacttcgggctcggcgagggcgaagagggccggctcggcctgagcgagccggtggcggcagcggtggaccgcgccgttgcaatggtcgaggcaatggtcgggcgcaaggccgagcaattgtatggacggccggcgtaggcgcggtggtcgtgttccttgtgcaggaggcatcatgaaaggctttctcaagtacctggtcctgccggcgctggtggtcgcgctgttggccaatataaaggacatccggcgttatatccggatacgcagcatgtagctgcgcatcgcgcagaccaaaggcacgccatgcaagcctgtgcactgccagtccgggaccggtccgccgcggtacggccacgcggcgaggagatccgcgtgcgcggcatggtgcagggggtcgggttccggcccaccgtatggcggctcgcacacgattgcgggctgtccggctccgtgcgcaacgacagcgatggcgtgcagatccgcgcctggggcgacgccgtggcgctggaccgcttcattgcgcggctgcgggacgagtgcccgcccctcgcgcgcatcgacgccatcgagcgccgcgtcctggcgcaggatgccgagggcgcggacctgggtggctttcgcattgttgccagcgtgggcgggccggtgcggaccggcgtggtaccggacgccgtggtctgtagtgcctgcatcgccgatatcggcgacccgctgaaccggcgctatcgctatccgtttgccaactgcacgcattgcggcccgcgcctgtcgatcgtgcgcgcgattccctacgaccgcgccaacacggccatggccgcgttcccgatgtgcccggcgtgccttgccgagtatgaagacccggccgaccgccgcttccacgcgcagccgctggcctgcgcggcctgcggaccccacgtgtggctcgagcacacaggcgggccgctggccgccggcccagacgacgcgatccgcgcggcgtgggcgctcctgcgcgacggcgggatcgtcgccatcaagggcatcggcgggttccagttggcctgcgatgcctgcaaccccgtggcggtggcgcgcctgcgccagcgcaagcggcgcgagcgcaagccgttcgcactgatggcgcgcgacctggcggtgatccgccaatacagcgagccgaccgcggccgaatgtgggttgctgcaaagcccggcggcacccatcgtgatcgtccagacgcgcagcgaccggcagggtgcgcccctggcgcccgacgtcgcgcccggcatcgccgcgctggggttcatgctgccgggcacaccgctgcactggctgctgatggcgatggccgaccgcccgatcgtgctgaccagcggcaacgccagcgacgagccccagtgcacggagaacgccgacgcgcgcatgcgcctcggcgcgatcgccgatgcgttcctgatgcatgaccgtgacgtggtccggcgcgtggatgactcagtcgcgcgcgtcgtgctggacgtgccccgggtgatgcggcgctcacgcggatatgcgcccgcgccgctgccgttgccgccgggcttcgctgccgcggcgccggtgctggccatgggcggcgagctcaagaacacgttctgcctgatgcgcgcgggcgaggccatcttgtcccaccatatgggcgacctggaagacgcgctgacccatgccgactaccgccgcgcgctgacgcaatacatggcgttgttcgagcatggcccgcatctggtcgcggtggacatgcatcccgaatacctgtccggcaagatcggccgcgacctggcacggcaggggcagctgccggttgcgcaggtgcagcatcatcacgcgcatatcgccgcgtgcatggcggagaaccgcgtggccctggccgccggccccgtactgggcgtggcgctggatggcatcgggtacggtgtcgatggcagtctatggggtggcgaattcctgttggcggactaccgggacttcacgcggctggcctgcttcaagcccgtggggatgcccggcggtgagcgcgcgatccaccagccgtggcgcaatacctacgcacatctggccgccgcggtcgggtgggataccctgatcgcccggcatgccagcctggcgcttgtacgcttcctggcaacgcgcccgcgcgaggtactggacgccatgcttacgcgcagcatcaacagcccgctggccagctcggccgggcggctgttcgatgcggtggcggcggccgctggcgtctgtcccgagcgggcatgctacgaggggcaggccgccatggagttcgaagcgctggccgatcgccgcacgctgagcgaggaagacgatggccgtgcctatccgttcgccatcgtgccgggcacgccggcctgcctggagccgggcccgatgtgggtggccctgctggctgacctggcgcgcgctacgccggcgccgctgatcagcgcgcgcttccacaaggggctggcgatcgccatcgcgagcatggtcgcgtacctggcggactgcccgggcgcggggtgccgcgcggtgccggtggccctgtccggcggtgtgttccagaaccgcatcctgctcgaacaggtcgccacgcggctttccgcgcaaggccgccgcgtgctgacgcacagccaggtacccgccaatgacggcggcctctcgttcgggcaggcggccatcgccgccgcgcggtccctgggaggcgcagacgttgcaggccaggcaaacgcgggctatcggagtacaacatgtgcctaggtatccccggacagatcctggaagtgcgcgacgccgccaatgccttggcgatggtcgaggtcggcggcgtgcggcgcctgatcaatatcgccttcatcgtggacgacgaccacaaggccgaggcttgtgtgggtgaatgggtgctggtccacgtgggctttgccatgagccgcctggacgaggcggaggcggcgcgcacgctggcgctgctgcatgagctcgggattgcgcaggccgagttcgacgagatgcgcgcggggtcgccggccccgccatagcgggcgggggcaggagaacagggcgggagcaaggctgggacggcaggaatcacgtagcaaggagacgcggcatgcccggggaaacaccactgcaagggctgtatccattcctgcacggggagcggcaggacggcgccaggcttgacgcagccttactcgcttccgtgcagcagaaggccagcgacagcattgacgccaagcgccgcttcttcgagcagaacgggcccgtggtggtggcggtggcccaggcaattgccttgacctaccgcaacggcggccggctgtttgccatgggcaacggcgggtcgagctgcgacgcggcgcatatcgcggtggagttcctgcatcccgtcacggcgggtcggccggcgctcgcggccgtcaacctcgtcgcggatacggcgatgatgaccgcagttgggaacgacgtgggcttcgcccacgtcttcgtgcgccagctggtggcgcaggcgaggcgcggcgacgcgctgatcggtgtctcgaccagcggcaactcggaaaatctgctcgcggccttcgccaagggcaaggagatgggtctggcgaccatcggcctgtctggtcacgacggcggccgcatggcggcgagcgcggacctcgatcactgcctggtggtggacagcgacagcattcaccgggtgcaggaaacccatgttgcgatctaccacatcctgtgggatctggtgcacacgttgctcgccgaggaccgcggcgggctggccgcaggaggcgcgcgatgaagtacgtcgacgaattccgcgatcccgccaaggcgcaggcgctggcgcgggaaatccgtgatctggtggcaggcatgggccgcgccaggcggcgcccgctgcagatcatggaggtgtgcggcggccatacgcatacgattttccgctacggcatccagcaactcttgcccgacgaggtggagttcgtgcatggcccggggtgcccggtatgcgtgctgccgatggggcgcgtcgacgactgcgtggcgctggccgagcgccccgaagtgatattcacaacgttcggcgacgccatgcgcgtgcccggctcccgcaaaagcctgctcaaggccaaggcggatggcgccgatgtgcggatggtctactcgccgatcgacgcgctggcgctcgcgcgcaaccatccggaccgcgaagtgatcttcttcggcctgggcttcgagaccaccatgccgagcaccgccatgaccgttctgcgcgcgcgggccgagggcgtgcgcaacttctcgctgttctgcaaccacatcacgatcatcccgaccatcaaggccattctcgattcacctgacctgcagatcgacggcttcctcggtccgggccatgtcagcatggtgatcggcacgcaaccgtacgagtttatcgcccggcactaccgcaagccgatcaccgtggcgggcttcgagccgctggacgtgctgcagtcgatgtggatggtcctcaggcagatcgcgcagggccgctgcgaagtggagaaccagtacggacggatcgtgccggcagcgggcaatgcgcaggcgctggcggcgattcaggaagtgttcgagctgcgcgagttcttcgaatggcgcggactgggctcgatcgacttctcgggtgtgcggatgcgcgaggcattctccgcgttcgacgccgagcgcaagttcaccgtgcccgacgtcaagatcgccgaccccaaggcctgccagtgcggcgaggtgctcaagggcgtgatcaagccccatcaatgcaaggtgttcggcaccgcctgcacgccggagtcgccgctggggtcgctgatggtctcgagcgagggcgcctgcgcggcgtactaccattactgccgcatcgacacctcccggctcgggcgacatggcgcgcgagcggccgggcaaacggcaaccagggatgcggttgccaacgagcgggccgcagccggagccggccatgaatgaccgtgttccggtcccgccggcacgcgcggcgcgcgtgcgggacacgaccatcaacctgacccacggaagcggcggccgagcgatgcgagacctgatcgaagacgtgttcgtgagcaccttcgacaatcccgcgctggccgcgctagaggaccaggctgtgttcccgctggtcagcctggcagcccacggcgaccggctggcctttaccaccgacagctacgtggtagatccgctgttctttcccggcggcgacatcggtacgcttgccgcggcgggaaccgtgaacgacctcgcggtgtgcggcgcgacgccgctgttcctgtcgtgcggcgtggtgctggaggaaggcttgccggtcgacaccttgcgccgggtcgcggccagcatgcagcgcgtcgcgcgggcagccggcgtcgcgatcgtcacgggcgacaccaaggtggtcgagcgcggcagcgcggacaagctgtttatcaatacggccgggatcggcgtggtgcgcgcggggctatcgatctccgcgcgccatgcgcgtgcgggagacgtggttctcgtcaatggctatcttggcgaccatggcgcggcgatcctggtggcccgccagcaactcgcacttgaggccgacctgcaaagcgactgccgcccgctcaacgggctggtcgccgcgatgctcgacgcctgccccgatatccactgcttgcgcgacgccacgcgcggcggcgtggcgacagtgctcaacgagttcgcgcaggcctccggcgtggccatccgcatccgcgaggtggacgtgccgctgcgcgaggctgtcaagggagcgtgcgagatcctcgggctggatccgctgtacctggccaacgaaggcatcctggtggccatagtgccgccggaggatgccgcgcgcgtgctggcggccatgcgcgcgcatcctgatggcaggcaggcggcggccatcggcgaagtggagccggggccggcggggctggtggttctgcacaccggctttggcgggcagcgggttgtggacatgctggtgggcgagcagctgccgcggatctgctgagtggccgcacccggtggacagcaagcgaaggccgacatgcacgaactaagtatcgcgaacagcgtggtcgagatctgtgccgagcaggcgcggggcgcgcgcgtgctctgggtgcagctcgagatcggccggctatgtgcggtgatgccggatgctatccggttctgcttcgacgtgtgtgcgaaggatacggcggtggaaggcgcggagctggagatcgtggagactcccggcgtggcgcgctgcttggcctgcggcgccgagttggagatcgcggtgccgttcgggcagtgcgcgtgcggcagcgagaacctggagttgatctccgggcagcagttgaagatccggcgcatggaggtggcgtgatgtgcacgacttgcggttgcggcgatacgacgggcgcagtggtctcgggcccggcagcagaaggtgaaccggcgccaacagccggcgcgggacaggacgtggtgcatgcgcatccgtatccggatgccatgtcacccgggcccgcgcaggaggccggcggcatggtgttgcgcaagcatcccgccgacgatcatgccggccacgcgggtgccctcctgcatgcgcccatgcatcggcgtgccatgcattaccacgaccatccgctcgagcatgcgcacgctcattcccacgaacacgcccacgaacatgctcacgaacatgctcacatccacggcacctccgtcgtcatcgagcaggacatcctcgccaagaaccagtggatcgcgcagcgcaatcgcggctggctggcggggcgctccattgttgcgctgaacctcgtcagttcgccaggggccggcaagaccacgctgctggaacgcaccatccgcgacctgggcccgacgctggagttgacggtgatcgaaggggatcaggccacgctgaacgacgcgcagcgcatccgcgcggccggctgccgtgcgatccaggtcaataccggcacgggctgccacctggatgcagacatgatctcgcgcgcgctgaccgctctcgatccgccgccgcattcagttgtcatgatcgagaatgtgggcaaccttatctgtccggccctgttcgaccttggggagcaggccaaggtggtgatcctctccgtgaccgaaggcgaagacaagccgcttaagtatccacacatgttccgtgccagcagcctgatgctgatgaccaagacggacctgctgccgtacgtgagcttcgacgtggcacgctgcctcgcctgtgcgcgccaggtcaatccggacatcgcgatcctacaggtgtcggcgctgtccggcgcgggaatggatgactggtatctctggcttcgtaccgcctgcgcagggcgtatcgcgccgcctgaggactcgtttccggcgtgaccagggcatcgctgggcggcacgtaccgggtcgtgactgtacaaatggagtgatccatctgtcagaaatgccaggttcatggtgtagcgcgccacgccgtcgcggcgctcacgcgcttccgtgtgaagcatcatgaggtgatgccttgcctacctgcgctagcgagcatatcgggacataccccagagtcatgacgattgaaagctggctgaaagatcggctcactacggttcgacccatccctgccagcatgcgtctgcatgccaggaacaccctgcgcctgaggctgcgcgcagtgccgcatttcaagtactttgaggagtatcgttttgcgcctacgcagcccaaaggattagcctccggcctgatgttcatcctggtcgggttggactgtggccggctttcattactggttaaggagtcggccaaaaaatggaactattcgaacacctggcccttggattctccacggcgctaacgctgcagaacctggccaactgcttcctcggctgcgtgctcggtacgcgtgctgccgggcatcggtccgctggccaccatcgccatgctgctgccggtgacctacacgctgccgccggtggccgcgctgatcatgctggccggtatctactacggcgcgcaatatggcggctccactaccgccatcctggtcaacctgccgggcgagtcgtcatcggtggtgaccaccatcgatggctaccagatggcgcggcggggacgagcgggggtggcgctggccaccgccggcatcggctccttcttcgccggctgcgtgtctacactgatcctggcagcgtttgccacgccgctgtcggaactggcgttcaagttcggccccgccgagtacttctcgctgatgtgcctgggcctgatcggcgccgtagtgctggcctccggttcgctcccggaggcggtggcaatgatcgtgctggggcttctgctgggcctggtcggcaccgacgtgaactcgggcgccgcgcgtttctcctttgatgtccctgaactgaccgatggcatcgacttcgtcgcgctggccatgggcatgttcggctttgccgagatcatcgccaacctcgaacagaaagaacaccgcgagacctttaccgatcacgtcaccaatctatggccctccaaggcggacttcaggcgcatggcacccgccgctgcgcggtaccgcgctaggctccattctgggcatcctgcccggcggcggtgcggcgctggcttcgttcgcagcttactcgctggaaaagaagacctcgaagtactcgcaagagttcggcaagggcgccatcgaaggcgtggcaggtccggagtcggccaataacgccgcggcgcagacctcctttatcccgctgctgacgctgggcattccgcccaacgccgtgatggcgctgatggtgggcgcgatggccatccacaacatccagcccggcccgcaggtgatgaccagcaaccccgcgctattctggggcctgatcgcctcgatgtggatcggcaacctgatgctgatcatcctgaacctgccgctgatcgggatctgggtgaagctgctgcaagtgccttaccgctacctgtacccggccatcctggtgttctgctgcatcggcgtcttctcggtcaacaaccagaccttcgacgtcttcaccgcggctggcttcggtgtgatcggctacctgttcatcaagctccagtgcgagccggcaccactgctgctgggctttgtgctgggaccgatgatggaggagaacttccgccggacgctgttgctgtcgcgcgggacgttcactgtgttcgtgaccggtccgctgtcgctcagcctgctgattgccgccgcgctgctggttggcatcgttgccctgccatcgatcaaggccaagcgcgaggaagcgttccaggaagagtagtgcccaagcgcgaaggacctgcgccggccttcgtgccggcgtatgcagcgtgtttggcaagccgctgatgagccgctgaacgacgcggggcgaagcggtgctggctatgcggccagtggcaccctcagcgagaacaccgcgccactgccgggcacgttgccggcctcgatgtggccaccataggcgcgtatgacctcttgtgaaagagccaggcccagccccacgccctccgctgtcccggcccgcgcgccggcgccccggtagaaccggtcaaacagatagggcagctcgctttccagtatgccggggccctcgtccgccacgctgaggacggcatccaactggtcggtggcacagtcgactatgatcttgccgcccggcggcgagaactttagcgcgttgtccagaagattggccagcaccaggctgaccggccctcgtgcgacttttccgtcaacgggcgatgttgcattgacgacgagcgttatctgccgctcgcgggcactgggttccacacggcgcagcgtctcctggaccacggcgttgagcgcgacagtctgcccgctgggatgctcctggcccgcgtcgagtctggccagcatcagcaggtcctccaccagcagggtcaggcgtcccacttcgtccaggcacgaccgcaaggtgtccacatactcctggctgtcgcgctggcgccgcagtgtgacctcaatctccgtacgaagccggtgacctgatgcggcaagtgaggcatttatcgattcgagagcaagctgacaagctcaatcgggtattacgcggcctacgcgtactatggcattgtggggaacttccgggcgttgcagaaggtacatagagcggtggagcgttactggcgcaaaatgctgagtagccggagtcgttcaggcggcgtcacctgggaggcattccaggaaatcaagaagcggttcccattaatgcgaccaaagctgcatcttccctatcgggcgttgcaagctatcgcggtgctgtgaatcaactgctgaagagcgtagtgcgatatgtggtgttggctcaaatgtggtcttgcggcgcccgtgccgcgatcctgacgggatccggccggccgaacgccacataaaaagcctgctacaaggaccggagaaacgccatcaacgcgggatctttggcccaccgcctaatcgcctctcgatcgctagcgatagtaagccgcgccagggcgttagccttcatctccaaatcaatttcggcgtaaacgttggtcgtatcgatagagacatgaccaagccacgcccgtactgtgttgatatcgacgccggatcgaagcaggtgggtcgctgttgaatgtctaatgctgtgcgggctgacgcgcttggatgcgagcgagggcatattggctcgcgccttgacagcgtagcgctctacgaccgcgtgaataccgaaacgcgtcaggggttgcccacagcgattgaggaatacccgttcctgcggtggtcgttggccagcgaggttgcacaactcttgcacggtgtcgggccatagcggacactggcgctgtttcttatcttgccgagaacgctcacgctgctggagatcgcatcgacgttgccgatggtcaggtgggctgcctcgtccgcccgcacaccggcattgtagagaaacagcagcagggcgtagtcacgtcgaccttgagatgtacgtcgatctgggcaagcaaggagcgcatccatttcagccttgtcgagatagggcaccaccgctcttgtagtcttcttgtacgggatgcagcgcaactgggtgcaccattggatatgttccgggctgtgctcgccaacgaatcgagccaaagcatggatagcagccagacgctgattccgcgtcgcgacgctgcatccgcgacggacttcgatatctgagaggaagtcccggacgatctcggccgacatatctgtcattgccagccggtcgaccggtttgtgggcttgacctgaaacgaaagggatcagttggcacagcgtgtcgcggtagctctgctgggtgttgcgagcgaggttccatctgctcaggcgtgacggtcaccggcttgccaatcgtccctgccgccagttctcccttttcactctgacgcatccaagccccaaggctacccttgggaatgccgagaaccttggccgtgaccgcaatcgattggccggccctcacttggcgaaccgcctccaatttgtattcctgtgtgtatttcgctcgcgtttgcttgcctgacatgtcttagctccttgctcgtatttgaacacagggctaagaactccactcttcgggggctagatcaccgacatccagcgtcatggtcttgtagcgggtgcgccctttggcccggtagtccttccagcggaaggtcacgccacgctcgtccagggcgagcaggcgctggttggagatcgccacgcggtgggtatagcgcgacaggtaggccagtaccgcctcgggcccggcgaaggtcgcgtggcatagaccacccattcgcgaagcggcgcgatccactgcgcgaaggcggctggatcggcgagcgtggcgtagtcaccgaagaaccgcaattgcccccgaccatgcgcggcctggagggcctcgaggaagcggcgtcggaacaggcgggagagcacgcgcaccggcaggaagaagccggggcggcaagccacccaccgttcgccgtccagtgacaggccgccgccggggacgatgccgtgcacgtgcggatgatgcgtgagtgccgatccccaggtgtgcagcaccagggtggcgccaatctgcgcgccgaggtgcttcgggtcggcggcgatggtgcgcagggtgtcggcggcgacatcaaacaacaggccgtagatcaccgccttgttgtaccacgcgatggcgctgatgggcgcgggcagcgtgaacacgacgtggtagtactccacgggcagcagatcgtcactgcgcgcttcgagccagcgacgtgccgcgctggcttggcacttggggcaatgccggttgcggcaggtaatggagagcaacccattacctgccggcatcgcgcctgcccgaagtgccagtcgctcgcccgcgcgcaatggctcgaacaccggcaggctgagctgctgcccgaggtcgagtatttccatgtggtcttcacggtgcccgaccccatcgcggcgctcgcctatcaaaacaagaatctctatgacatcctgttccgcaccagcgccgaaaccctgcgcacgatcgccgccgatccgaaacacctgggcgccgagatcggcggccagacctcatcgggtcctgctcataggttcgtagccgcgatcgccaaccaaaaaaaccctctcctgcgggaaatccgcacgctacgttctgtgggaaccggaggcgggtgactgcctccggtcacccggtgctcggggtgcgattccccgggtctacttaccaaatcggccgcgcacccaatgagaggcgctggcacaagcttgcacagacttgcccgccaagcggaagcagccttgccacatcggccgacccaatggcaatgccgctgccacccgccggatggccgttctggaaacggcttgagcgacgtcaagaatttcctttctcgacaagcacttagccgggcctcctggtggtttcccttaggccctgcgaaattggcgcacatcctgcgttccacctgcgcatcgaagtgacgcaccaagcaaggggcgaacattagtaaggaggagacaacatggatagtcgtatcacgacaatactcgagcgctaccgctcagaccgtacacggctgatcgacatactttgggatgttcagcatgagtatgggcacattcccgatgcggtactgccgcaactgggggctgggttgaagctgtccccgctggacattcgcgaaacggcgtcgttctaccactttttccttgacaagccgtcgggcaagtatcggatttacttgtgcaattccgtgattgccaagatcaacggctatcaggcggtgcgtgaggcgctcgaacgcgagactgggattcgcttcggcgaaaccgacccgaatgggatgtttggcctgttcgacaccccctgtatcggactcagcgatcaggaaccggcgatgctgatcgataaggtggtattcacccgcctgcgacccggaaagatcacggacatcatcgcgcagttgaaacaaggacgatcgccggccgagatcgcgaacccggccggtttgcccagtcaggacatcgcctatgtcgatgccatggtcgagtccaatgtccgcaccaaggggccggtgttcttccgtggccggacggatttgagatctttgctcgaccaatgcctgctgctcaagcccgaacaagtgattgagaccatcgtcgactccaggctgcgcggacgtggcggcgcagggttctcgaccgggctgaagtggcggctgtgtcgggatgccgaaagcgagcagaagtatgtaatctgcaacgccgacgaaggtgagcccggcacgttcaaggatagggtcctcctgacacgcgctcccaagaaggttttcgtcggaatggttatcgccgcgtatgcgatcggctgccgcaagggtatcgtctatctgcggggggaatacttctacctcaaggattatctggagcgacagcttcaggaacttcgggaggacgggttgctggggcgcgctatcggtggccgggcgggctttgatttcgatatccgtattcagatgggggccggcgcttatatctgcggcgacgaatcggcgctcatcgagtcctgcgaggggaaacggggcacgccacgggtgaaacctccgttcccggtgcagcaagggtatctgggcaagcccaccagcgtcaacaacgttgagacctttgccgccgtgtcgcggatcatggaggaaggcgcggactggttccgggcgatgggaacgccagactcggccggcacccggctgctgagcgtggctggcgattgcagcaagcctggcatctacgaggtggaatggggggtcaccctcaacgaagtgctggcgatggtcggagcgcgggacgcgcgggccgtccagatcagcggtccttccggtgaatgcgtgtcggtggcaaaggacggtgagcgcaagctcgcgtacgaagatctttcgtgcaatggcgccttcaccattttcaactgcaagcgcgacctgctggaaatcgtgcgtgaccacatgcagttcttcgtcgaagagtcctgcggcatttgtgtgccatgtcgcgccggcaacgttgatctgcaccggaaggtcgaatgggtcatcgcgggcaaggcctgccagaaggatctggacgatatggtcagttggggagcgctggtgcggaggaccagtcgatgtggccttggggccacatcgcccaagcccatcctgacgacgctggagaaattccccgagatctatcagaacaagctggtgaggcacgagggcccgctgctgccatcgttcgatctcgataccgccttgggcgggtatgagaaggcgctgaaggatctggaagaggtgacaagatgagcattcaaattacgatcgacggcaagacgctcacgaccgaggaaggacgaacgctggtggatgttgccgcagagaacggcgtttacatcccgacgctgtgctacctcaaggacaagccctgcctcggcacctgccgggtgtgttcggtcaaggtgaatggcaatgtcgccgcggcatgtacggtgcgggtctcgaagggcctgaatgtcgaggtcaacgaccccgaattggtcgacatgcgcaaggcgctggtcgaattcctgttcgcggaaggcaaccacaactgcccgagttgcgagaagagcggccgttgccagttgcaggcggtcggctacgaggtggacatgatggtctcgcgctttccgtaccggttcccggtccgcgtggtggaccacgcgtccgaaaagatctggctcgagcgggatcggtgcatcttctgtcagcgctgtgtcgagttcatccgcgacaaggcaagcggccggaagatcttcagcatcagccatcggggtcccgagtcgcgcatcgagatcgatgccgaactggcgaacgccatgccgccggagcaagtcaaagaggcggttgcgatctgcccggtgggcaccattctcgagaaacgggtcggttatgacgatcccatcggacgacgcaagtacgaaatccagtcggtgcgcgcacgcgcgctggaaggagaagacaaatgagagccccccacaaagacgagattgcgtcgcacgaattgcctgcgacgccgatggatccggcgctggccgcgaaccgtgaaggcaagatcaaggtggccacgatcggtctgtgcggctgctgggggtgtaccttgtcctttctcgacatggacgagcggctcctgccgctgttggagaaagtcaccctcctccgctcgtcgctgaccgatatcaaacgaattccggagcgctgtgcgatcggcttcgtggaaggtggcgtctcgagcgaggagaacatcgaaacgctggagcactttcgcgagaactgcgacatcctgatttcggtcggggcgtgcgcggtgtggggcggtgtgccggcgatgcgcaacgtcttcgagctgaaagattgtctggcagaggcttatgtcaactcggcgactgccgtcccgggcgccaaggccgtcgttccattccatcccgatatcccgaggatcaccaccaaggtctacccttgtcatgaggtggtcaagatggattatttcattccgggttgtcccccggatggagatgccatcttcaaggtgctggacgatctggtgaatggacggccattcgatttgccgagctcgatcaatcgctacgattgattaacggagggtttgttatgagcagaaaactggttatcgacccggtgacccgcatcgagggtcacggcaaggtggtggtgcacctggatgacgacaacaaggtcgtcgacgcaaagctgcacgtcgtggagttccggggctttgaaaagttcgttcagggccatcccttctgggaggcgccgatgttcctgcagcgcatctgcggcatctgtttcgtcagtcaccatctgtgcggggccaaggcgctggatgacatggtcggcgtcggcttgaagtccggcatccatgtcaccccgacggcggagaaaatgcgccggctcggccactacgcgcagatgctccagtcccatacgaccgcctatttctacctgatcgtgccggagatgctgtttggcatggacgcgccgcccgcacagcgcaacgtgctcggcctgatcgaggccaatcccgacttggtgaagcgcgtcgtgatgttgcgcaaatggggacaggaagtcatcaaggcggtgttcggcaagaagatgcacggcatcaattcggtgccgggaggcgtcaacaacaacctgagcatcgccgagcgcgaccgtttcctgaacggggaggagggccttctgtcggtggatcaggtcatcgattacgcgcaggatggcctgcgcctgttctacgacttccatcagaaacaccgggcgcaggtcgatagtttcgcggacgtgcccgcgctcagcatgtgcctggtcggcgacgacgacaacgtggactactaccacggcaggctgaggatcatcgacgacgacaagcacatcgtccgtgaattcgactatcacgactatctggatcatttctccgaagcggtggaggaatggagctacatgaagttcccctacctcaaggagcttgggagagagcagggatcggtgcgcgtggggccgcttggccgcatgaacgtgacgaagtcgctcccgacaccgctcgcgcaggaggcgctggaacggttccacgcctacacgaaggggcggacgaacaacatgacgctgcatactaactgggcacgggccatcgagatcctccacgccgcggaggtggtcaaagaactgctgcatgacccggacctgcagaaggatcagctggtgttgacaccgccccccaatgcgtggacaggtgaaggcgtcggcgtggtcgaagcgccacgcggtaccttgcttcaccattatcgtgccgatgagcgcggcaatatcacgttcgccaacctggtcgtcgccaccacccagaacaaccaggtcatgaatcgcacggtgcgcagcgtcgccgaggactacctgggcggacatggcgaaatcaccgagggcatgatgaatgccatcgaggtgggtattcgcgcctacgatccatgcctgagctgcgcgacacacgccctggggcagatgccgctggtggtctcggtctttgacgcggcggggcgcctgatcgatgaacgcgcccgctgagtttccctatgtgacccttgccgatttcgatgatccgtcgacgctgatctacggaatcggcaacgtgggtcggcaggacgacggattggggtgggctttcatcgaccgactggaagcggagtccctctgctccggggcggaggttcagcggcattatcagcttcacctcgaggatgccgacctgatcagccgcaagagaaaggtgttgttcatcgatgccacgaaagatgcgtcggtggcgtcattcagcctggagcgcgcggaaccacggatggacttcagctttacgtcgcacgcgatctcgattccgtcgatcatggcgacctgccaaaggtgctttcagtgcttgccggaagtctatgtgctggcgatccggggctacgagtgggagctccgcatggggctgacaccgcaggcacggcataacctggacgatgcgatcgcccatttctcgatgcgggccgagcgtcaaacctcgtgaaatcagttagaaggagaacgcgatgaaagagcaggaaatcgacaggatcgcaacgatgatctacgaggcgcctttgggcgagtatatcggccgggatggcgctgccattcttgccgaacacgccgcggaagcacgcctcctcaagggcgatgagtttctctaccggagaggagatgtcacaagcagcttttatatcgtgaccgatgggcgtttggcgctggtcagggaaaaaaccaatgagcgcaccgcgcccatcgtgcatgtgctggaaaagggggacctggttggcgagctgggttttatcgatcagacgccgcattccttatcggttcgtgctctgggcgacgccgccgtgctcagcttcagcgcggaaagcatcaaaccgctgatcaccgagcatccggaactcattttcaacttcatgcgcgcggtgatcaagcgcgttcaccatgtcgtggtgactgtcggggagcacgagagggagttgcaagagtacatctcgacgggggggaggggacggggttagtcactctccgcgtccagctgaaatgcaaaaaagcatatccctcgagcgccagcgacgtgcgtcccgtcgagtggtacctcagcgcgtgaccgacatggtaggagccgatcatgcatgagatgtcgctggccgtgggtgtgctgcagatcgtcgaggacgtggcgcagcgcgacggtttttcccgcgtaacggcagtacggctggagatcggccggctgtccagtatcgagccggaagcgctgcgcttctgcttcgaggaggtagtgcgcggcagtgtggctgacggcgcgcggctggagatcgtggacacccccggtgccggctggtgcctgcactgcagcgagacggtggcgatcggagcgctgtacgatccctgcccgcagtgcggcggctaccaggtgcagcccactggcggcacggaaatgcgcgtcatggatctggaagtggcgtgacggaaagcggaagtcacgcggaatagaagacgaggagacaggatcatgtgcaccaactgtggctgcgccgccggcgaaacccgcatcgaaggccaggagctggagcatgtcgacgagcatgcgcatgccgacggcaccgtccatggccacgccccccatcatcacggcgagcacgatcacgaccacggccctgcctaccgtgccgtgcgcggtactgaccatctgcattacggtcacggacccgctggtgcccatgccccaggcatgagccaggcgcgcatggtgaagatcgagcaggacatcctgggcaagaacaacgcctacgcggcgcagaaccgccgctggttcgacgagcacggcgtgttcgcgctgaacttcgtctcgagccccggctccgggaagaccaccctgctggtgcgcaccatcgaggcgctgaagtccacctccaggctggccgtcatcgaaggcgaccagcagacttccttcgatgccgagcgcatccgcgccaccggcgtgcaggcgctgcagatcaacaccggcaagggctgccacctggatgcccacatggtgggccacgcgctggagaaactgcggccggaggacgagagcgtgctgctgatcgagaacgtgggcaacctggtctgcccttcggccttcgacctgggcgaagcccacaaggtggtgatcctttcggtcaccgaaggggaggacaagcccctgaaatatcctgacatgttccgcgccgccagcctgatgctgctcaacaagtgcgacctgctgccgcacctgtccttcgacgtggagagggccatcgagtatgcgaagcgggtgaatccggacctgcacgtgatccggacctcgtccgccaccggtgaaggcttcgacgcatggctgacgtggattgccgatggcctggccggccaggccgccaggcgcagccagagcatggagctactgcgcagccgcatcgccgggctggaagcgcaactggcggcgctcaaggtgtagcggccatgctgatgccgcgccgtcctcgcaatccgcgcaccgtccgcatccgcatccgcgtgcgcggcgtcgtgcagggcgtgggcttccggcccttcgtctatcgcctggcgcgggagctgggcctcgccggctgggtgcgcaacgacggcgccggcgtggacatcgaggcccaagggagcgccgcggccctcgtcgagctgcgcgagcgcctgcgccgcgacgcgccgcccctggcgcgggtggatgagatcggtgaggaacgctgtgcggcacaggttgacgccgacggctttgccatcctcgagagcagccgttccgatgccgccgtgcacaccgccatcggccacgacacggccgtatgccccgactgcctggcggagctgttcgaccccgcgaaccggcgctaccgctacgccttcatcaactgcacccagtgcggcccgcgctacaccctgacgtgggcgctgccctacgaccgcgccaccaccagcatggcgccgttcccccagtgccggccctgtctcgacgagtataacgcacccgagcatcgccgcttccacgccgagcccaacgcctgtccggactgtggccccagcctggcgctgctcaatgcccagggcatgccggtcgaggacgttgatccgatcgccgagacggtggcgcgcctgcagcggggcgagatcgtcgccatcaagggccttgggggcttccatctcgcctgtgacgcgcacaatgccgacgcggtggcgcggctgcgcagccgcaagcagcgcgaggagaagcccttcgccgtcatggtcgcgaacctggcgacggcggcgcagtggggcgacatcggcagcggtgaagcggccctgctcacggcgtcggagcggcccatcgttctgctgcgcaagcgcagcggcgtcgatgggcggttcgcgggcgtggcgccgggactggtctggctgggcgtcatgctgccgtacacgccgctccagtatctgctgttccacgaggccgctggccgccccgagggcctcggctggctcgcccagccgcagtcgctggtgctggtgatgaccagcgccaaccccggcggcgagcccttggtcaccggcaacgacgaggcggcgcagcggctcactggcatcgccgacgctttcctgctccacgatcgcgagatcctggtgcgttgtgacgattcggtggtgaggggcgacggcgaaccagcgcctcacgtccagttcattcgccgcgcgcggggttacacgccgcgggcgatcaagctggcgcgcagcggcccctcggtgctggcgctgggcggctccttcaagaacacggtgtgcctgacgcgcggcgacgaggccttcgtctctcagcatgtgggcgatctcggcaacgctgccacctgcgaggccctgatcgaggcggtggcccatctgcagcgggtgctggagatccggccgcagctcgtcgcccacgatctgcatccggacttcttcagcacacgccacgcagcggagctggcggcgcaatggggggtgcctgccgtcgccgtgcagcaccatcatgcccatattgcggcggtgctggccgagcacggctcggacgaacccgccatcggcctggcgctggacggcgtcggcctgggcgacgacgggcaggcgtggggtggcgaactgctgctggtggacggcggcgcctgtaagcgcctcggtcacttgcgcgagctgccgctacctggcggcgatcgcgccgcgcgggagccctggcgcatggccgctgcggcgctgcatgcgatgggccgcggcgaggagatcgaggggcgcttcccgcggcagccgggggcgccgatggtgaaccgcatgctggcccagcggcttaacgcgcccctctcctccagcatgggccgctggttcgacgccgccgccggcctgctcggcacacgggaaaccatggcctacgaggggcaggcggcgatgctgctggaagggttggccgagagctggggcgagcaaccgtcgccgggccgccccaagacggttgctcactccctcgggggggtgccgcgcagcggcgggggtacatacaaggcgctggcgctgcccgatgcctggcgcatcgatgcgggcaacaccctggatctgctgccgctgctcgaggcgctgtccgccgaaacgaatgccgcgcgcggcgcggcacagttccacgccaccctggtggcggcgctggaagcctggaccgtcgcgaccgtccaggtcaccggcgtgcgcacggtcgtcttcggcggcggctgcttcctcaaccacatcctcgcccgcaacctgtgccggcgcctggcggcgcggggactgaccgtgctgacagcgcgccagctgccgcccaatgacggaggcattgccctcggtcaggtctgggtggcgctgcagcgggcgcccaactgacgagagggtagaacatgtgcctggccatacctgcacgcatcgcgaaaaaatttgacaacgacatggccctcatcgacctgggcggcgtggggagtggccaaaaacggggggcaaatccgtcaggaaaggggtctattgtgtactgagactaccggagaccgccatgcgcatctcgatccaagcctgtattgagcgggcgggcgaacagccctctaaggtgattgaagttgcggtgatcgagcgcaatgccgatgtcgctccggcctcaggactgggcctgttcattcgcgagtcacaagagatcctgcgacagcttcagactgtggtcttgaccgagcaggtggaccagttcatccggattaccggtcgctgtcaactgtgcggaggcaggcttgtcatcaaggacacaaaatccttggtctatcgcaccgcttttggcaaggcgaggctgcgaagcccgcgcttttactcttactgcagcgcatgcggttactgctcaagtaacaagggcacgctttccccgctggcacaggcgttaccagaacgcgtacatccccagtggacctggctgcagtgccgatatgcaagcgtgatgtcttatcgtttggcacagatctttctacgcgacgcgtttgccggcggacgggaactcccatgctcgagcgttaagttgaatgtaggccgggtcgggcagcggctggagcaagaggcgcaacgtgcaacgatggtgatgtcggctgtgaccgcgccaccgcgaagctcgccattaaccgggacgccgattggtctgcagatcgatgcaggttatatcaagacgccgcggcagcaggatggtaagcgatggactcccgtggtcgcctccaagctgatttggcccaagactcctcgtacccatgcgcatgcctacgcagtagggcatgaccctagccaagggctgcgtcagcaggcgttcttacagtctgttggcatcgggccccaggccccggtcacagtcatcagtgatggcggcgatgatattagtttcgcgtgcaagttgccatcggcaacggcccgcgtgctggactggtatcacattggcatgcacaaagcgaaatggctgttgtggcacggtgagtcgaagcggtgcttggagaggctggagtcgctgcgacgggacacaggttgggttggcgctcgcaatccactaggacgcgtgattcgttaccttcgctgttgctctcgctatctcgcaaactatcagcagcggcgggctcaggggctgccgatttcaagcgcgggagcagaatcggtggtcgactatgtcattggccagcgcatgaaaaggaacgggcacatgcgatggacgattctttgagcacgcgttcacgcagccggttcttcgagtatgcatcagtgccacgcagacctcggagtgccatgaggaggttctcgaatcgtcctcgccgttgagaacggcacatcgaacctgcagtagtccattggctccacacatgccatatgcggttgtggactgtacggtataaaccgcgcccccgcgtttggccactcccatttcgatattggcggaaactgtgaccgccattggcggaaatatcgatctgcaacagaaagttccggttcctgaaaggtaaaaatcccacactctggggaagtgtggggttcggggaggtgaatcaggttgggggaggtctctgcgctcggacttgcagcccttagagggcggcgcggtcggatgcaatgtagtacctggcgccgtccgtataagtgtcgaatttgccgctttttgcgccgtcagtgtaaacatcgtacttaccagaccgcgcgccgtcagtgtaagtatcgaatttgccactcttggcaaacaccggagcggccgccagggtggcagcgagtgtggtgacagcgactagggcccggcgattggtattcatggcttacctctttctttaaactggtgaatgccattccctttggtttagtgcttgttgcactgcggcattcgatgagcgccatattagggatttcccttgtggcggtaaacccttacgctcgcaacgatcggtttcaaaatccacaatagtctgccctgaaccgaaaaaattcgggcagaacgcgaccgacatgtgtgttggggccgagccctagcaatttgccttcgctatcctttagatcgatcaacaacacgtcgaatcgaccgcaccatcacatgtcgttgtccatccgagcgcgcccggcccgaaggacgaagcgggcgcgcggcacgcgcccgagccagcgcccaggtcctacgtcagttgttgctgcaccacccgatccgatgccgctcctgcgtggcctcatgccgcgcatcctcctcgctgtgcagataaccgctcgtcgttgacagcgagctgtgcccgaagttgtcgcgcacaaaacgcaggtcgacctgctggtcggtcatgtgcgagccggcggtgtggcgcagccagtgcgccgaggcgctggccagcaccgctgcttgtggttcccattcgggcccgcgcgcccgcaggcgcgcggccgcctggccgaacacctctttgagaatcaggtgcagcgcgccgcgcgacagcgctttctcgctgcctgcttttccaattaccggcagcaccagtggacgcgtctccccgaactgcggggtaggcggcaacgcgtaggcgcggcggtagcgcgccagttcggcaatcagctcatcggtcgccggcaccagccgaatcttgttgcctttgccgttcacctccagccaccagcgctcggttccgtgggaatcgcgtcggcagaagaacgcgcccatggtggtggccgtcagttcggaggcacgcaggccgcccagatagagcacggttaatacccagcggcagcgcgccgcgtgcaggcgttcccgcgccgtctcggtcggcattgccgcgacggcgtccttgaccgtatcccacaggtcgtggctcagatagcgggtgatgcgcgcctgagtgggcgcgcggcggcggcgggcgagggcgagcgggttgccgcccaggtaacccgcctcggtcagccaggcgaacagcgcgttcaggatcaccagcgcctggcgcacgctgccgggtgacagtggcccggcaaacgggcgccagtccggatggttgcgtgcgagtttcttgctaccggccagcacccagcgcgcggccggttgcggatcggcaaggaagcgctcgtagacgagcaggtcttcatgggtcagcgaggacaagggtttgcccaactggagcacggcccacaggattagccgttcaacctcgcggcgataggtggcgaccgtcgccacgctgtcggcatagcgcgcgagccaggcggtcacggcggctaggtcgtcgcccgcggcgattcgcgtgccggtggtgggcgcgcggttgcggccgtcgcgcccggacagcgccgacggcagccgcaactgctccagcggcgtgggcagggcggcgagagggcgggacgcaggcgggtagggtggatgtgcgggtgattccaaaatcaggcgttagtttgcacaattttgtatccgagacgtggccgtgaaatcgacgcagcccgggcgtgcgagaacaaatttacttcacgaaattctgcaccattttgttcccccggcgaacattcgaagcaattttgtatcttcgccaacgtttgttccattctcgtcgtgcgatttttcccgaaggtgccctaaggtttataaccgtcgcctcttaggcgatcggcccattttggagcgtcgcatggaagacggcattgacgacaattccggctcttttgaaaaatgagtgggttatgcggcatgcgggttgatcgcggagaagtcgagctttccggcgatcaggaagatcacggtgcgcatggttttgaagctcacataaccgcgggccttgcgcttggcggcttggaacaggccgttgagcgcctccaggaagccattggtctggcgcgtctgggtccatgcaacgataccgtcgaaatgcttgcggatcatgcgcgcgacctccttcattggctcgaccttggatcgcatgacgttcgtgcaccactgctcgagcattgcggaaacaacgttgatctgcttgcgctcaaggatttcgcgcaactgctcgcgatacagccaggcacgggcagtgcgtttggtcgtgacgttggcgatcaacgcgtcgagatcggcacgctgcgcggctggcaacccgtcgcgatccttgagcagcgtccagcgcaggcctttgaggcttggatcggtcttctgttcgatacgccgggtcttgtccacggctgcagaagcgtgagccacgacatggaacttgtcgaaggtgatgcgcgcgttgggcaaatgctcgctgacgcccttgatgaacgccggcgacatgtcgatactgaccaccccgatctgctcaggcgcagcgttgttctcgcgcagatgtgcagcgaacttgccaaccgtggcagcatccttgccttcggtcacaaacacgaccttacgcgcgtcggcatcagcgacaagcgtcaggtagttgtgaccgcgcctgtaggacgtttcgtcaacggcggcagcggtcacgccggccagatcgagttcggccaccgcgaggtcgacatagcgctcgcagatagcgtacacgcgatgccacgactcacccaccgttctggctacagcagaaaacggcatctgctgcgcaagcgccaccaccatggcttcaaacagcaacgtgaagccagagagcttgccagcccagtccggctcgaccaacaccacgcggccgtcgggaagcttcacgcgtggcgtgcggacttccagatagcagtcgtgctcgaagaagttcaggtgccgatagcgtttggtcaccgtgtcgtgaaccgggtgcccaccggcgacctccgggtgggaaaagcggctgccggcgacaaagtcaatctggatcgtcaacgtcttggtttgcgcgttgaagtcgacttcccggacgaaccacggatcgcttatgccaagggctgcttcaaacagtttgctatgcatcgctcttgttgctctttacctgaaacccgccacgataccacccacttgaaattcaaaagaggcacaattcctattactcccgccggatgatagacgggcgaaccgtcgacactgcccactgggccagccccgacgagggagcgcttactggtgaccgacgcgtcctgtaccttgcgagaaagcaggcggtttcgctgtatcttttcggtgcctcgggcgaaagcatcaggcggctgacgtcaattggcgcaagacaggcctatcgtctcatccgggagcgctgccttgagacgcatcccgacgggcgtccttatggctggcgcggacttgtgccatggctccgagtcaagccataccgtcgtagcaggaaggtccatgtcgacccgttcggccgcggcgctgcgggcgcgatgcaggcgctgctggactgccagccggcgcttcgtcaggcatttgaggcgcgtatcctcacgagcgcctcagccaagcggctagtcgaaactaaacagtcgagaaggcgtcattgcgcgtggtttctggaccaattgcgtagcttcgggtacgaagcgcgaaacgaatggccgttcaacacatcgagccttggctactcttcgatctgtcggtatatcgacaaggtgctgtcggcccacccaagggcgctggccgcggcgagtggcgggccgaatttggctttgaagctgaggtccggtgacggaaccgggcggccggtgctgaggttcatgcaacgcgtcgagatggacgcgcacaagctagacggacgtttctgcgtgtcgcttcccctcatggggggcggtttcaaggagaagatcgttcatcgtctctgggtcgttgtgatcctggaggtcgtttcgcgcgcggtgctagggtactacttcagcgtgagacgggaagtatcgaaagatgacgtcatgcgcgcgctgaagcgggcattgggcagatggtgcctgcgcccggtcagtttttgcgatacgccgtatctgcctgaagccgggcttctttccgctttgggtagcgatttcgtcgggctatgctgggacgagaccagcgtagatggtgcgcttgccgagacttgtcagcacgtgcgggatgcgctgcgcgacagcgtcggctccacgctactggacccgaagacctcgttctcgaaacgtcgaagcaaggatgaccgcccgttcatcgagtcgtttttccgcaatctggccggacagggatttcagcgtctttccaacaccaccggcgccaatttccaggaccgcaagggaagacagccggaagaggtcgccctggcgagtcgattccagtacgaatatgcggaagagttgctggacgtgctcattgccaactacaacgcgacaccgcacagcgggattggtaaccgcacgccgctcgcgtatgcgaagttcttgtaccaccattcccagcagagcttccggcgagccgaccccgctatcgtggacacgctattcagcatccgcaagcgctgcatcgtgcgcgggggcgctaaaagcgggcgtgccccgttcgttgagttccattacggccgttataccaacgacgtgctgcataaccggcacgaccttgtcggatccgagatctgggtggtctgccacaaggaggatgactgccgggtggcgcttgcctccacgctggacggtatgtcactcggcgttttgcgggcagcaccgccttggaacatgtcgccgcacagcctgtcgctacgtgctgcaatttgccaggcgtgtactcacggaaagtttgcgattccggcaggcgtcgacgccatcgatgtcttcatgcgctacgtggagagtcaggcgcacaaccgcttgccggtccatccggcctacctcgaggcacggcgcatactggcagccgcagccgaatcatcaatcgggccttccatgctggatgcagcaatggctcggaccaaggcaggcagcagttcttcgaacggtagcaagggggccgcgccggagccgacggcaagacgcgcgcagtctggcgcctcggacccgctgaagccttctgcgggttccacgctgcctccgcgtcgaatggcgcagtcgaggtaagccatgtccttctcactacccgagcgcatcgatccgcggcactgcatcgtgacgaagcagtacgcggtgtatacaccgcccatgcacgaaatgatcgagcaaatcggcgaatggatcgaccagcagcgccccggcggctatatctatggcgcgtcccgcctaggcaagtcccgctgtgtgcagtggtacgttgcaaacgaattgcaggagcgcttcaaggccgtcatgcccctggtggtgtggaatcgccgccccgacagtcagagtagtgaagcgggattctggcaccagctcctactcgcctcgcgcttcgaattcgccaacccggcaaagccaccgaagaaagccgaaggcatatacctgtgcaagcaacgcttcatcgccattgcgaacaacgcgcaacggaactacgtggtgctgcttatcgatgaagcgcaggatctgacgttgcgggagtggaaatggctggtcggcctgcaaaatgagctcgattacgagggctatttactcagcgtattttcagtcggctcacaccagttgaactatcgccacgaatatatggccatcacgggcaacgctcacgtcgccgcgcgctttatggcagcgcatgcgcgcttccacggcctgcgctcgcccgaggagatcgggtacgtgctcaacggctacgatagcgactccgagtggccgccaagcagcggcgttccgtacctggagcacttcgcaccggcggattatgcggcagggcgccggctcgcccaatgcgcggcgcagctgtggaaagcgctgatggagctttcgcccgaatctgcgcgccggcatttcgagtttccaatgcagcatgtcgcgaaagcgaccgaggcgatactcttccaactggcgcggggcgaagactgggccgacgtgacctcctacgagagctggttgcgagaactcgccaaagcgaacttcccggaccacatgaggatcatctcgacgggtggttgacatggcggcctacccatcggtgaactggtggccgggaaacctccgtccgtacgagtcgaggctgtcgttcgtcgcccgcttctgcgcactgaatggcatcaacgtccgaaaatgcgcggagtttttgagggtggagcccgatggctgcacgccgcttccgatcgacgaaatcaagcgcctggcgtccgtgctcggtgaggccgcgccgcttgtcgaagacgttttctcgccttccatacggttcatcgatgtcggccgttatggcccgcctcccgatagtcgcgagcgacgtgccatccgctattgcgagacctgtatgcagcacggctaccacagctacctgcatcagcttgggtggctttcgcggtgcccatttcacctgagcgagctgaaaacgacctgggcgcagaagcacaccgccagcttcgtgtcgcagcgtgtgggcgcgttggagttcgtgatgcggcaacgctgcaggacatggccgcacggcattgatgccggctttcccgcccgagagcaggggcgtgttgcgtcgctcgccggctgggtcgcacgggcgagcgtcgctgccgcgcgcatgtcgctcggcgagatctggtcgtcgggcaacgatggcatgccgggggctgtctccctcgaccaagcgttcgctcagctgcgcacgcttgagcccccgcccgaggacatcgagcagctccttatcgaagccggtgatcggtggactctggaaagccacgtgtttgcgcggcaagcgaaaatccaactcggccacctcaggttgtgccacctcagctttgccgacgttcttcacttctatatacgcatcaacgccgcttcggcgaatccgtcttcgtttgtcacgcgcctgaatgccatccaggaccggcaggctcgccatggcacctgtcgctgtcggtggaggctgaccaaggagggacggctctcgcgctgggtcagcgtgcgtccagaggaggggccccgctggggcctgatctgtccatacgatatcgcgctcaacgaacttcaactcggctggggccgttcggacctggcgctctccaatcggccggcggagcaggaacggcggcgcttttgcagcgtttctcacgcgatgcgcgacttgggcctcatccggtatacgcgggatgcagcggtagcgccggcgggctatctatatgccgatcaggacgtctggacctgctgcgagtgggttcgggagtcgccgctaaccgcagtgctcgatatggcggtcgcgtgggaaaccgagctgacgttcgacgcgttgaccacttggctagatgacatcgatcggggtgtcgctccgcttgagcgcgacgattccaagtcttgcgtccgcctgcgcgaaaccgacgatggcctcttgctgatcaagtggacgagggcagaagcgaatgtgcgtcgggggctatcccggatctgaacacgacgtaccgtgagcaacgtgaagccgttggcttgcggcgcgccagagtttcggcccagggggctcggaacaaaattgtgcagacaacggtaacaaaattgtgcaaaccaacgcgagcctcgagagtcacactcaatctcaatattataaacataagcgcagttatgtctaaagttatacggcaaacgttagctattaaacgtaatacgtagtaatatatatagtcacataactcgctttttcgcgatgccggctgtcgacctcgatctgaccgacgccacgctgcaggctgatttggccgagctgcgcgggcgctttcccgagacccgcgcgctgtatcgcgaggtctgcggcctgctgttcttccgctatggcgtcacgcccaccgccaacaagctctacagcctggtgcgcaggggcagcatgggcacgcccgccgaggtgctgcaggcgttctggcaggaattgcgcgggcgcacgcgcgtcaccatcgaccatcccgacttgccggaggcgttgaaggacatcgcggccggggcggtccagaccatctggcaggcggccaacgaggccgccaccggcgagctggccacgctgcgcgccgaggcccgccatgcggccagcgccgccgaggccgagcgtgatgccgcgcggaccgagaccgcggcggcccgggaggaggtggccgcagtctcggcgcagctggccgaggcgcgcgacgcgcacgctgccgtgcaggcggagctggccgcgcagcggcaggcgcacgcggcgactcaggcccggttggaagcggggcgggaggaactggacgccgccgggcggcagctggcggagctgcgcacccaattctcgaccgagctcgagcgcgcccgcgaggcggtggccctcgcgcaagaacgggccgaggccagcgagcggcggagcctgcgtgagctggacgcggagcgtaccgcgcgccagcagagcgagcgcacggccgaagcgttgcgcggcgaactggtggcggcgcgcagcgaggcccgcgacgcggccgtggcgcaggccgaagtccgcgcccggctcgaagcccaggccgcggcgctcgccgatcggctcgccagcgccgagcaggcgcagcgcaaagtggcgcacgacctggacgcggtgcaggcggcgttggccgcagcgcagcgccgggccgaacgggccgaggccgaagcggcgctggcgcgccagctgctggcagaattgcgggtgacgccacccgggcggggggacggtggtggcgggcggcggcgcaaggccggcagcccggcgccgaccgaacaggcggcgccacgcgaaaaactggacgacaagcaggacggacagcaagaaaatgacaggcagggcgtgccgacggccgcttccaacccggatgacggcagcgacagcagtgacgacagcaacgacagcgccaatgacagaaatcaatgagcgggccgcggcgatccgctggatccaggcggagatggccgactacgggctgaccatggaggagctggcagcggcggggtgcttcgatccgccgccccctccgccgccgccgctacccgcaccagcgccaccgccagtggtgtgctaccgcaacgccgcggggcagacttgggacgggcagggcgacatgcccgactggctgcagcgggcggccaatgcggggcagtcggtggagttttaccgggccggataggacttaatattatccccgcttcaacagcagaccggtctggggccgtactccttttgatagcggattccccttatcttggcttggcccaaactactcgcagcttcttggtcgtatcggacaaatatcacaatctcttagcaatattgtgacagaatcccactgtcgctgacagtgacgtccgtgctaattatttggagatcgatgaatggtagtcgctggtgtctttttgaaggcaaacctcgctcgaatcgttgcgctcaccggtactcgagagtcgcatacattagttggcagtcgattcaataaactcgaactcatcaaaaatccgtcacaagatgatgtcgaggtcttcgtgcaggcgctcagagctttttgtgctgagcattaaatagacaaaattgtggtaaatcgtagggcaacttccgggcaaggcgcaggtggggcaggaacatttctgattgagggcgttctgcttgccacgtcgcccgcgccgctaacctttgcccacaatgcgaccattgcggcgactgagcggagggagaatggacgtaaaactaaccgccccgctacggcagatattggtaaggcgtatgacctggcttacgaggggttgaattgatccatggctcttgatatttcaaatttgccacaagaagccatcagcgcactaaagcaatttccagagtttgagatcgcttcattcaacgactctggagcgaacggatatgtacttattggccggcatagcgtgctccaaaaggaagttgctataaagatatatttccacggggagagtgatattgatcaagagccaacgattattgcaaagataaatcacgaaaatgtcctgaaagtatacgacgcaagaaaagtgggaaaagattgctcatatttcatgacgccagcggccagtgaaggtgatctcgcaaatttcctagatacgtattttatttcacttcctctggctcataagctgctatgccaacttttatctggaattgcggcattgcatatgagtccgaatttgcttgtgcatcgggatttgaagcccgaaaatctgttggttcataacgacaatctcttgattgctgattttggttcagttcggcgaatcgatgagaaaacgggtagtgcaccggcatcgaagcacagcattttgtatagaccgcctgaagcttttggtgaggactcattctttaatttttcctcagatatctaccaagccggacttattggatttttgttatttggtgggtccttgagcaatgatttgcttagttatttgacaaaaaaacaaaaatcggagcttactggtattcagggtgggtatgagctatccatttatgtggattcttgcatcgaaaaaaaagtttcacgcggaaatttggctgacttttctactcttcctttttacattccagcggccattaagcgcacattgagagcagccatttcttccgccgacaaaagatattccagtgtcagcgaatttctcgcagaattatctcgattaagaggaaatatgccagattggtcgacccgacgtgagggtgttctgcttcgcaattggaatggactagactaccgaattccgcacgacgaagtcgctatattgaagtgcaaatcaggagccgaaaagtatcgctacgacaaaagttataattgtggcagctatgctgagctattcgatcaaatgaaggagcgactcgggctgccatgacctatttatggcacacgccggccctcgacctcgatctgaccgacgccccgctgcaggccgacttggccgagttgcgcgcgcgttttcctgagacccgcacgctgtaccgcgaggtctgcggcctgctgttcttccgctacggcgtcacgcccaccgacaacaagctctacagccaggtgcatgggcaagcccgccgaggtgctgcaggcgttctggcaggagctgcggggacgcacgcgcgtcaccatcgaccatcccgacttgccggagacgctgagggacatcgcggccgggggcggggcagaccatctggcaggcggccaacgaggcagccaccaccgagttggccacgccgcgcgccaaaccatcgagtggggtcaggcgacgctggccgcggagcgccaggctcacgcggcgacgcaggcgcggctggagccggggcgggcggaactggacgccgccggcagggagctggcaactgcgtacgcaattctcgaccgagcttgagcgtgcccgcgagcaggtgagtgggctgaataatcagcgtagtgtcgacttgcgagattccagccgtcgccttggcaactacgctgatccatttgaggcgggttctcagcgttgaagggaggaccggccctcgctcatgggaagttgggtgttctgttgcggagaggcgaccgctactcattgagtgcgggtcgaacctctggaaatggggcgcggatgttaaactgaaggcagtcaaccgccgtcacatgtgctgttgacgacacggcttgcagcgcggatatcaacggtagcgggcagcgtcagtatcaacacgccacattccggaggaagttcgcatcatggccagcgcagaccagatcaaagcgctcgtaaaatcgcacatcgatcaggacgatgggaagttctattcgattgcgatgcaggtggctgcccatgaggccaaggtggggcatggccgattcgccgtagagctgcgggatatggtcgactcggccaaacaacgggcggcgcggccgacggcaggtcaaatagtgcccattgcacgcccgcgtggcgagattgcgaatctcctccatgtgagctacccgtcgaaccgactggcggatatggtcttggatgacggggggcgcgagcagttgcagcggatactgaaagagcagcgcatgcttacgcggatccgcgagcacggactgtctccgcgtcgcaagctgttgctggtcggcccccctggtacggggaagaccatgaccgcttcggtccttgccggcgaactcgggttgccgctgttcctggtgcgtctcgatgcgctgattaccaagttcatgggcgagacggccgccaagctccggcaggtattcgatgccatctcggacgtgcgcggcgtgtacttcttcgacgaattcgatgcgattggttcccagagaggcatgccgaacgacgtcggggaaatccgtcgggtgctgaacagcttcctgcagatgatcgagcacgatcagtcaaacagcctcattatcgctgccacgaatcatccggagatcctcgactacgcgctgttccgccgcttcgacgacgtgatcgaatatcacgtccccagcgtagcgcaatccgcgttgttgttgcgttcccgactgggctcgtttgcgccgaaatccttgccgctcaccgcgcttgccgagacggcgatggggttgagctatgcggaattgcgccgggcggtcgacgaagcgatcaaggaagcgctgatgcacgacgagccgaagatatcgacggaggcgctggaagctgcgctggtcgaacggaagaagctgaaccagagactgaacaataagaactcgcaaccacatgccggtcccgccgcaaaataagcgtcgccatttactgcccacgggcacatccacttcttctccatttactgcacatgccgccaatggccgcggtcggcctgtcgttcccgacttgccacggcagcagcatggacaaacgctccaggcgcaaatcgaacggcttcaggcggtcgctgtggccgcccataccgaacaggctgccctgggcctctccagcggccttggcgtccaaatccagtttgcaagccagcccaatgttgagcttgcagtgcagagcctcagcgccgagcgcggcaacccccggagtcacatcgagcttctgagcgtacggcaggacggcgagcagacttttgccagcgtgttcgtccccgaggggaagctcgcgcatttcgagggctatgtcgcggattacctcggcgaaaagaagaacaaggccggcgggccactcgaccacaagccgctgatcaataccattgccgccatccagccgatcgaaatccgcacgctctggaccgacgagcccgagctcttgccaaaagatcaggacgaaggtttttggtgggaggcgtggctgccggtccggggtaaccgaaacgcggtcattggcgatttcaaggcgttgatgcagcgtgccggctgccaggtgcccgacaagcagaccgattttcccgagcgtacggtggtgctcatgtatgggagccagaaccaggtcaagacctcgctgctctccctgaactgtgtcgccgaattccgccgcgccaaggaaacggccgacttcttcgatacgatgggcgttgaagagcagcgcgattggcagcaggatctaatccagcggacgcatctcgctgccgccgaggatgctccgcggctctgcctgctggattccggagtgaaccgcggtcatgaattactggctcccctaatggccgaggatgacatgtactcggtcgagaaggatggtcggaccgatgacgaggcgaatcacggtacgggcatggcgggcctcggtgcatatggcgatctcaccgaggcgatcgagtcgaacgcgcccattgcgatttaccaccggctcgagtcagtcaggctgctgaaggaggcgggtgcgaacgctggcgagcctgagcttcatgcgcagctctttggtgaggccgtctcccgcccggaaatttcgtacccggaccgcaaacgcatcttctgttcggccgtcacggcatcggactaccgagatcggggccgcccctcttcatggtcggccaaggtcgatagtctggccgcagatgccgacaacgaaggacagtttccgcggctttttgtactgtcggcaggcaatacgaacgatatcgatgcgtggaacgcctacccggacagcttgtcgacgaatctgatccatgaccccggacaagcctggaatgccttgacagttggggcgtgtaccgccaagacgactgcgcatgcaggctacgaagcgatcgctgaagagggcggcttgagtccgtattcgacgacttcggctgcctggcaaagcgcatggccattgaagcctgatgtcgtcatggagggtggcaatgtcgcgcgcgacaattttggtgccatcggcatggacagcctgcagctgctgtccgcccaccatctgccccgtgaacgagtcttcaccacgttcaacgcgaccagtgccgcagcagccctgtgcggaaagctcgcctcggaaattgctgcggaatatcctcagatgcggccggaaaccattcgcgccctgatcgtgcattcggcggaatggacggaaggaatgcgcaaggcgtatctgcctgcggcgcaacccggcaaggcggcctatgcgcgtttgatcaggcattgcggatggggcgagccgtcattggaccgcgcgctctggagcgcgtccaattcgctgacactcgttattgaggatgcactgcggccttataaaaaggagcgcggtgtcggtcccgcttcgcgggagatgaacctacatgcgctgccgtggccgcgcgaggaactggaggcgctgcaggggctgcctgtccaaatgcgggttaccctttcctactttatcgagcccaatccgtcagcgcgcggaagcgtttcaaagtatcactacccgtcccatcgtctgcgtttcgacgtgcagcgcccgctcgatgcgacgacggaagcgtttgtggcacgcgtgaacgctgccgtcgagcgtgacgatgaggatcctctaaacgctgcggacgcggactggtatctgggtgatcggcagcgccatcgcggctccctccatcaggacgtatgggaaggcacggctgcggaactggcgagccggggggtcctcgccgtgtatcctgcaccgggatggtggagaacccgcccgggactggaacgctttgacagcgtggccaattacagtctgattgtttccatcaggaccgagcagaatcaggtcgacctctacaacgcaatcgcaaaccaaatcgcaatagtaaaccaggtgtgagaagacgacgcgactttatcgctgattggctgctcgtccgagtcagccataaaggcgttgagaaggccggccaggtgttgcggaagtttgtccgccgccttctgagtaaccaatcccgcagtaaccaatgtacgccggatagtgctaccgctgccccaagctgtcgaggaatacctgtcgcttctggatcgcgatgccgcgccgttgaacctgcggtgtcgacgcgcagattttgcagaatgcaggtgatccggcggcactggcgacgcgtccttgttcccgagcacttgacgctcgggtaattgcacaatgtcatccaggtcatacctcagggcttgcggagcgaacgcaggaacaggtaggtcagaagtatgcgagatggggtcttctgaacaaagaagtaaggctgcggcctgcctccgaatcccctgaagaagcgctcgaccggctccagcaccgaaccttcgaagtcaaacgtgcgcgccacgccagaggcaaagcggatggcgtcccaaatgcacaggctgctagcgccgctggtgcgcagcttcgggtccgagccggccattaggtaataggcgacttgtccgtcccagaccagatagacgcctgcatgacggtagccctgtttatccacggcaatgaagatcttgcgggcccctcgcgccgcgcatgcagcgtccaggcggcgcacgtagtcgtcggtatatggcaacggcatgcgttgccgggtgaagacctgccggttaagttggatgaactcatcgataccgaggtcgtcgcgcacctgcagaccatggcgggagcccgctttacggatttcgcccctgatgttgtgctgcatgccattccagagcgcggccgtatccgacaggtcatcgagcacgtacgtgtacttggtggtctggcggaatcccttccaggcaaagggcagccaattggtctggctgggatcccagtgctgttggaaatggtcgaaccgcggcagttgcccaatcagttcgtccatcaactccttctgttgacccagcatcctcgccggctttcccgccatcggtgccagccacggtccggccatcttggccagcgctggctgggcgattactgagaacccatacaggcgccggggggcgtagggaaggcttgcgaccacctgtccaccgcgttccaccagggcaacgccccagttcccgggaccggcggtggcatccagccaccacgcctggctgaacaggggaatattggccgtattgcaaagctgacggtatcggcgttgcgccgcgtcgcccccagtgtctgtgtcagggatctgcttgactgaatcagcgggcccacttgcggctggtgcattaggatcagcataaggtttgcgcagatcgtcgaacatatcgggtggcttcctcgaaaagtttccggcccgtcctcatgccacgcaccttaacttcggcgagcggtagcccgcgcctgaagctgaaatgacgatacattgcattcccacgcagacgacgaggcgttggtgtattaggcaacaaaaccatatgtatgagcttgcaagcagccaaccatagggagctcaatatgtcatggcgaagagagggctcagtgctcacaaccatacttagcccggcaagttcggttttccatggtacgagtgaagccgtgcttttggatggaccttgacccgcaaggcttcgccaagaagcagctctggttcccaactttggagggggcggtcgccgcaggctgggcgctggccaagcgatagaatgcagaactgcacatagatcgacacgacgtagccttttccaataaggaacggaatgtcagaaacaaccaatcagtccggaaccgctacctggtcgtatgaagagcttacggcaatcacggaggagtccctccgccttcttctggagaagtcccacggggacatctccactggtcgccgggacgagtgggtcgcgtatggcctttatcttgggtggtcaaagcagactgaaggtcgaaggaagcgtgaggacgatgagcggctgtacaaacttaccctgcgattcaggggcgcaggttagacggactccaacctggagacatcgctgacataagcgctaagggtcgctcccccgaaaggcttccaacctctgcgactatatgtccgaaaatacatcacccaattgtggtatgaatccggaagcatgggtatacttgcctccgggtacacatttcatgttgtcccacatcccgttgaacccccggtcccccgggggtttttttcgcggtatcagaatgctgaccggcccgagcggctgcgatgaagtagtcgcgattggcagcacggctgtagaggcttggctgggctggattgaccttggttagccttggatttgcgagttgcgagttatgcaaggccctgatttataaagcgttatcggccacgcacgatgcgccgaggtgccgttccgttgtcttgcagacatttgtgtgtcctcacgctgcgtttcctaaatgaaacttaggatagtgctgtgtgtgccgcgagcaagttacggccggcatcaatgccatcggtgccgtgatccagagtgcaaatcaagcaggcgaggacagagccggacgcgtgcgctagcgtcggacgttggcgtcagggacgcaaacagagtgaacatatggcacacccaaagcagctcactcctcgaacatggaacggcgctgagggcgctcccggactgtagctaaatttcacctgacaggcttggatggccgtgattggcttccggtaacctttgttttgcaatttgcgagttgcgcaaggcgctgatttataaagccttctagtttgtcaccaaaactcgttgcgatggcggcggtgatgggtgcggcgcttgcggcggtgggatcggcaattcgaggatgcgccattggcgcagcggctgggtcaggtcgtcggcgagtaatagcctacgatcatgccatgtcagatgccagctgctctccatgatatgcttgtgctcccacttcatgggcctggctcatggggtgatccaacaggcgctccagcatgtcctagaaacaggcatagggctcgatcagcaagtgaatctgcgcgtggtcgcctcgcgaaacgtctggcttttcctgcgaagctgacaccagctggccgggttcccgataaaggacgcgaacttgtcgaatcaagcatcaaggcgcttcaaagttcatgttgctcttgggtccatcagcatagtcgatcgacattccctatttgagatcgagatcccgaatcggcggcggatactcgaaagccataatggcctccaggtttccgctagcggttgtcctaaacacttcaataaggaagcgacgcccgtcgtgatgcacgccactaacgtggtaataaacacgacccttccactgcgtcaagccgacctcgagtggtaatttaacacctaaccggcgcgcatagttgttcaaacgaggatcggaaactagatcattaaggttgcccatgtcgctcagcgctgcgccaattggcgatccaaagaatcatagttcgatacaaaccgacatgcaaaaatcgataaatgtctttcaggtttcaaatcgatcttgcaatttctacattcgaacttttgcagtctttgcatgattttcataaccaggagccacgggctgaccaacgaacagctgcatatgtcagcatttgcggccggcgttcagtgagagcttacgaggccgtcttacagttctcccgcgaagcaaacgaaatgccacagaggtagtttcgcttgttcggacaaagagccggagtttataagtggaagcgctggtgcagtcaggctgccgctttgattgctcgcagcgtggcgaagtatgccttatccgggatctggtctccagactggaatagggtcgtcgttcgttgtaccaggtcacgtagttcgcgatagatccgcgcgcattgctgaccgagtcgtaggctttcagatagacctcctcgtatgctgcgccaaagtcgttcgacgaacacgttgtcgcgccaacggcccttgccgtccctcgacagctggatgccgcggccaagcacggcgtcggtgaactgtgcggcggtgaactggctgtcctgaacggtgttgacgatctccggcgtgccgtatttggcaaaggccacctcaagcgcctcgacagcatggccactctccagtgtgaatcgccagacctgacgccttcggcccccgccaagaagacacaactgggggcccgcagctttttgactttgccgattcgcttcactagattcgaatcaaacgatcgaggaacaagcattgatggcaccgagcgagccccgaagtggcgcttggtgtacattcagaatgcagggaaacaaccataggacaacaaccatgaccccctgggaaattcaaggtaccgagctgattaactgcaattgctcatacggttgcccttgccagttcaacgcgctaccgacccatggtttttgcgaagccatgggtgcgatttcgatcagcaacggcttctatgacgtcgtgcgactcgacggcgtcaacatcgcggtggtgttcaaatggccgggtccgattcacgaaggcaagggcaagtgccagccagttgtcgacgaacgggctagtccggagcaacgtgatgccgttctgaaaatcatgtcgggtcaggataccgagccattcgcaacgatgttctctgttttcgcgtcgacgctcgaacaggcttacgatcctatcttcacgacgatcgatttcgacgtcgatgttgatgcgaggcgcggccgaattcatgtcgagggggtattcgacatcgtgggagagccgattcggaatccggtgacgggcgccgagcatcgcgctcgaatcgatctgccgctcggcttcgaatacgagattgccgaaatcggctcggggacgagtcgctcgcaaggcaatatcgcgctgaatctcaatagcacgtacgcgcagttcgcacgactgcatatgaacaataaaggtctcatccggcatcatactgccacatgagctgcatcgagaatttcctcggccgtgagcgcgtaatcacagcacttggtattgttgctgttatcgtgtcgtcgtggtactacttgtggactggtgcgggaacggggatggctgcactcgacatgacggcagtcgcattgttcccgcatcggctggcagatggcggcagcatggaaatgtcgctagcgaccgtggtcgtgatgtggtggacgatgatgatcgcaatgatgacgcccagcgctgcaccgcttatcttgctgtatcggcgcgtcattcgatattacggcgcgccggaatcgagatcactcgttccgtcgatgcttcttttggctggctatctgactgcttggcttgcgttttcgatttgcgcgacatggctgcagatgatcctgcagcccaccgggcttatctccgccatgatgttgtggtcgaagagcgcggtcctttctgcaatcgttcttgctgcagcaggtttctatcagttcacgccgctcaagcgcgcttgcctaaagcagtgccgttcgccggcgaatttccttactaagcattggcgctcgggagtcgcgggaagtttcctgctcggcatgcgtcacggggcgtactgcgtcggctgctgctgcttgctgatgacgctgttattcgtgggcggggtgatgaacgtcttgtggatcgcggcgctgtcgctgatcgttttcgtggaaaaaatcgtgccgggcggcgatcggctcggccgcgtgctaggggcggtgttgattgcctgggccggtgtgacgctgctggcatgaatgactgtagattcgcctcgacaggtgtcaagccaaacaactatgagcaagattctgcttgaatcgaccctcacttgcccgcactgtggctgcgtaaaaaaggaagttatgcctacgaatgcatgccagttctattacgagtgtggccactgcggtgcagttatgcggccgaggcggggtgactgctgtgtattctgctcgtacggaacagtgaaatgcccaccgatccaacagaaaaaaggatgctgcgtctcgcttcgcggggcgtgaactggctggagttcaggaataggagtagatgacccttggtctgagagtgccacatggatagagaaagcgccgcgtggcctgtgctcccctggttcacataatgacaatgactccaggaatcgcaggagcgtctcgggtggccggtaccgagctcgctgcccatctagcggattcatttgagcgcgctcgttcttcatcgtcaggcttcggccgagcaaccattcaatctcagttgccctgacgccggactgcaaccatcaccatggcaggcgaatgagtagtgccaacaagggatccagcttgatgtgggaaaaaagaacccgccggagaggcgggcagttcaaaggaggtaaagtgaaggatataaccttcgattccagcatacatggaacgtgggccggcgcgctgtcggattgtgtctgattacgctggcgccccatctcatgaagggactgcttgcgacgtctcatgctatcgcatgatttcgtctggcaagatgcctcgaagaccttatgctggaggtcgcaggaaaggggccagtgaccttcgctcgactcgccttgaatacaggcggtcttctggttaaggcccacgatggtgccgatgtgctcgtgcaaaggctgatcggtgaggagacggtatcgccgagcaggaagtctgcgcgctgcgctcgttgcggtgagggcggtatgcgtgcggcggtggctgcggcgtcacggcggcgtaggaaaagaccgggccggcgcgttaaacgtccccgaccacagcatggatcagatggtctgcgatgtagcgacagtcatgccgatatgcaaattgctggtgcggttgatcattcggtcagatacttaggtgcagggcagcaaggatgtccatgatgcgcaatgtagcggctagcgcggcggcgccagttttgtggatctggctgaccgggcgagatggtcgatcgtctaccgttcatctagaatcgcacgagtccattcaacttgcctttcagcgatctgccgatgagcgattaacaaaaataattcgatgacccagtccgccaccgctcattacttcgtcgaaagccccagtacaggagccttggtgctcggcgcggtcggtgtcgtcttcggtgatatcggcactagtccgctgtatgcactaaaggagtgcttcagcaaggaacacggcatcgccttcagccctgatgccgtgctgggcgtcatctcgattctgttctgggccatgatcatcgtggtctccatcaaatacgtggtgttcgtcatgcgtgccgacaacgacggcgagggtggggtgttggcgctgatggcgctggtgctgcgcaccgtggcgcagcgctcgaggaaggccaagatcctgatgatgttgggcatcttcggcgcctgcatgttctatggcgacgccgtgattacgccggcgatctcggtcctgtcggcagtggagggacttgagatcgcggctccccagctttcgcaattcgtaataccaatcacgctggtgatcctggcagcgctgtttctgatccagcgccacggcaccgcagcggttggaaagctgttcgggcctatcatgacgacgtggtttgttgccttgggagcgcttggcatcctcaacttggtccaggcaccggagattctgaaatcgatcaatccttattacgccattagcttcttggtcgagcacgccctgcaggcctttatcgtgctgggctcagtatttctggtgctgaccggggccgaggcgctatatgtcgacatgggccacttcggcgcgcgcccaatccgcatcggctggttcgtcctcgtaatgccgtgcctgatattgaattacttcggccagggcgcgatgctgctgcacaacccggccggcgtggaaaacccgttcttcctgatggtgccggaactactccagttgccgatggtgctgctagcgaccagcgccaccgtgattgcctcgcaggccgtgatctcgggtgctttctcgttgaccagccaggcgatccagctcggcttcgtgccgcgcatgcgcgtactctatacctctgccgccgaaatcggccaaatctacctgccggtagtcaactggctgttactggtgctggtgatcggcgtggtcatctcgttcaagaagtcggagaacctggctgcggcttacgggatcgccgtgaccaccaccatggtcatcaccacctttctggcagcggtatgcatgcgcaatgtgtggaagtgggacccggcgcttgtggcggtgctgggcactagcttcctgctggtagatctagcattctttgccgccaaccttctcaagatcgccgaaggtggctggttcccactgctgttgggcagcgctgcattctttatgctgatgacctggtacagcggacgcaagctgctgcgcgcgcgcagcctggaagatggcattccactggagccgttcattgccggcctgctggcgcacccgccgcatcgcgtcgagggcaccgcggtattcctgaccggaagcatcgacacggtgccggtgtcactactacataaccttaagcacaaccgcgtgctgcacgaacgtgtggtgttcctgaccttcgttacgcgcgacatcccctatgttgatgacgaccaacgcgtcagttgcaaagacctgggcggtggcgcctttatcctgaagtcagaatacggcttcaaggaaacgccggacgtgcagaaggtgttggacctggctgaccgcaagctcggcatgcatttcgagttgatggaaacgtcattctttatcgcgcgtgaatcggtgatcccgtccaggcttccgggcatgccgatgtggcgcgaaagcttgttcgcctggatgcatcagaacggggcaaagccatcggattttttccaaattcctgccaaccgtgtggtcgaactgggcaccaaggtggagatataaacgaaccgcctgtattagtctattgccgggcgctacatacttagtggtcagataagacgctaaattaacctcacagcgaatgctcgtcaccgaacagatcgctccgcatccatcgtcgatttcctctctccgcgatggccggcaacgaatgcggcgccattcagtccgcgcgccgacgtatcgggtcagccaccgggtaaaaggggtaaaagcgtgcgcgtgccctcggcattggcgcgctcggcggcaaagcgggccagcaccagcagcgcctcgcgatgccggaagaacagggtctcgggcaccaccaccgcctcgaaccctattcgatcgccatagccctgctcgatgccggcgtgcccacggcgcgcttccgcatcgacgcggtcgacgttagcgcccgtgcgctggcgcgcgcgccatggcgagtacggcggcaacgccttccgcagtggcccgctggatttccgtgaccgatatttcaccgccggccctgcaggctacgcgctggacccgcgcgtgcgtgcgcaggtgcggctgccaattcacaccacggttgttaccgatagcccgtcagcaactgcttcatggcccgaaaggccgtagcgcggtcatcgccgagcagaaaagcgtggacgcccagttctcgccagtgctcgcactgcccgatagcgcgggggatggcacagaaaggcacaccacgcgcctggcaggcttgcgcgatgcgctggattgcggcttgaactgagggatgctgcgcatcagccggcacgccaaaactttgcgacaggtcgatcgcgccttcgagcaccatgtcgatgcccggtacagcgacaatttcgtcaatggcgtctacaccttcccggtcctcgatcatggccaccaccatcagctcccagttggcccgctggaagtaggccggcaacgtcagcgtgccgaagccggtcgtccggcccccagtaatgccgcgcgtgccgagcggatggtagcgggtactgttgaccgccagctcggcctccgcccgactgcgcacgtggggcaccacgatgccctgcgccccggcatccagcacgcgcagaatgatatccggcgccgcccgaggcactcgtaccagggcagtgatgccggcgcattccgcggcacgaatcatgttttccagcgtctgtggatttaccccaacgtgctcaagatccaggatcacaaagtcgaagccggcatagccgatcatttcggtcaccagcggcaatggcagggaattgagcagcccgaacacctcgcgcccggcagcgagtgcggcctttagccggttaggctgcagcatgagcatcctccgcagcaaggtagcagtgctgcgggtgcgggtggcgcaggaagtcatggtgcgagatatgccaggcgtaggcgccggcatacgggaacaccaccatgtctccggcacgcacactgtccaccggcgcgtcctgcgcgaggacgtccttcggcgtgcagagctggccgaccacgctgacgcgcgcgtcccgcacgccggggcgggcaaacggatagcgccacgactcgaccggcagcacccggaacgggtggctgtgcccttgcgcatagggcgtgcggaagtggtgcgtgccgccgcaggccacgacgaaggcgcggtcgaaggcgtgcttgacgtcgatcacttccatcgcgtagtagccgcagaaggcggtgatatagcgcccgcattcaaggcgcacggtcagcccgtcgcgctgcgccgacagcgccggcaggccttcggcaaagccggcccagtcgaactgccgctcgggctcgcggtaattgacgccgatgccgccgccgacgttgacctggtccagcgtgtcgagcccgtattccgcgcgccagcgcctgacctgttgcaggtaggcgtcgagcaggcgcaggtgggcggcggcgtcgagctggtgcgacatcaggtggaaatggaagccgcgcagacggatttccgggtgtgcgcgcagccacgctaggcacgcggggagctgatctccggcgatgccgaacggagtgggcttgccgcccatcatcagcgtggtggcctgcaggccttcaatggccaggttgacgcgcagcagcaccggggcggtgacgccgcgcgcgcgcgcgagccaggccaggcgttcgagttcatgcaggctttccacgtgcagcgcctcgacgccgagctccagcgcgccggccagttccgcatcggtcttgccggggccgctgaagatcagcggcacgtcggcaaaatgctcgcgcacccaggccagttcgccgccggaggaaatctcgaagccgtgcgccagcggcgccagcgtctgcaggatcggcaggtcggagttggccttgatcgcgtagaacagctcgaaacccggcggcaggccgcgcgcggtggcggtggcatggcgccgcagcgcctccaggtcgtagacgtaggtgctgagcggggcgctggcgttggcaagcgcatttgcaagcgcgttctgcaggtggtcggtgacgcgcgaccagcgcagttcgggggcggtcattgccatgccgcctccacgccggcgaagggaatgggattggcgacgggcacgtaagtcgaggcgcggtcggcgcgctggaagaagcggttgctgaaattggtcttggccgggaacgggctgccggcgagcaggccgttgatgcgccgggccgaggccgcgttgccgtagcgatgctggtaggtatgcaagtgatggcgcacgaccgaccacagccgcgtggtcatggccgggcggctgccacccagctgggcgatgacctcgcacaggttgttgacgaacaggcaataggcgacgcggttccagccctgttcttcgtcgtaccacagcgacgaccgcgcgcgttcactgagttctggcatggaagacgcgggatggcacgacggcgtcagcttcaccccctcgaagtcgcgcaggaagagttgcgcgggcaggtcctggcgcaggcccagcaccacgttctgcaggtgcggttcgaagatgacgccatgcgcgaagaagagatggaagaccgggtagagcagttgcgacacataggcggagaaccagcgctcggtcatggcatccaccgtggtcccggcctgcgcggcgagcgccgccagcagccgctgcatgcgcgcttcgccgtagtaatggttgccgaacagcgagccggccagcagcggcacgcagtcgggcgcgcgcagcgtatccacactctggcgcaggatcaggccgaagccttcgatgacctggcggttctgctcggtatcggcgtccttgaggtcgaccgacaggaaggccggctcctccatcagcgccaggcctgggaacagccgcgccaggtccggcaacagcggacgcagcacgcggttgacgtgcatggcgctttccagctcgtaccaggcgttcttgcgcacgcagttggtaatgcggatgttcagcgacagcttgtagaagtacgggttgccgggctggtacagggtccggatcgacgaggtgggaaagaagtccgcgccctgcgtgcccaggtcctgcaggcggccgctcgccagcgcatcgtgcaccagcggatgctcgcgcaggtagcctgcctgccaggggtggaccggtaccgccacgcggtcggccggcacggcgggggcattcgctgcgatcaactggtcgcaactggcgtcgcgcagcgactgctgcgcgatgtcgccgcgcggcaccgcgaaccatgccagcggaaagcgggtgcgcaactccggcgagtagcgcagcaggtcatcgtcggagaagccctgccggctcttcggcgtggggtggaacggatggccgaaggtcagcgattgctcggaatcgatataggcctccaccggatcggcaggaatcgtggcgggcaccggcacggacagcacttccgtgctcacggcgacgctgttgcggatctgctccatcagctcggtgttgggcggcagctcgtgctgctgcgccatctcgcgcaacagcagcgcggccagcgcttcccagtcgagcagtgcccacggcttgttctcggccttgtggaataccggcgagaggtagcggtagttgccggtcagccaggcaccgccgaccacggacagcagccggccgtggatatgcggcagctgcacttccagcacttgggccggctcgcgctgcagcgtcatggcgatggtcgcgggccagtcgttgtgcccggcgggcgggccgacgcgcaactggccggcgggggccgcgacctcgcggcagtagcagttcagcagtgtttcctggcagcgccgcgcggcggccagttccgccagttccgtcaatacgcggcgcgtgccggcatgttccatcttggtttgcacttgcattgtcttgtgacctcgttctcgggagggatcagagtgcgcttatgcgctgtcgggcggtaaggagcaggtaggcgacggccggcgcgagcagcgcggcgcctagcaggtaaggcgcgcgctggccggccaggctgactgccgcgccggcgccaagcccggccaccacgccaccccatttggaactgctttcgaaccagccgaaggtgcggccggcgttgccggcgtgcaccacgcttgcgaccagcgcatgcagcgcgataaagccggccgtcatggcgatgcccatcagcaggcgccaggccaccagcgccggcaggccgagcggcgccgcttgggccagcagggcgatcaccagcgtgccgtaggcggtggcgagcagccccagcgacggggccagccccagccgccgcgacagcaacggtgccgcggccaggtacaccaggtggggcaggccgaacagcaggccggccgtggccgcggagatggcaggcatgcgctgctgcatgtcggggatgaagtacgggaacgtcaccacggtggcgaacacgaaggcgaactgcagcacgtagatctgccgcggcgtggctggcgccgatacgcttgcgccgcccgcgcgtgttgccgggcgcttcgcagcgccggtggcttcgccggcaggcagccatgcgatcagcgccgcggcggccagcggcagcaaggccagccagcggtacagcacgatcggcgattccgcccccatccacaggcccaggcaggcgggcgccgctaccagcgcggcgcgcgccgaccactgcatcgccgtcaggctgcgcgtgagcgtggtgccgctggcgaccgttgccaggtaggcgttggaggccgagaacgtgccgcccagcacgccctgcagaaccagggccgccaggaacgcaaacgagttggtcgcatagctggccagcaggaagcttgccgccagccccagttgcgcgcgcatcagcagcggcttcttgccgaagcggtccgcgagccggccccaccatggcgccgacagcgccgccagcagcgtcggcaccacgtagaacgcgcccgcgagccacggcacgtcgttatgcagcgagcgctgcaggatcagcgcgaagaacggcggcatgcccagcgccgcgaaggcggcgatgaaatggcatagcatcaccaccgcgaccacctgtcgcgtgcccgcgctcatgcggccacccgcaggaagttgggcgcgcgcttgccgtagaacttgttgacgtcggttgcgccggtctgcgccttctccaccagcgatgcagcggtcagcaggtacttgaggtgcaggcggtcgtcgtcgagcagcacctggcgggcgaagccggtgtcttcgccggcggcggccaggtcggcaagcacggccgccacgtggtcccgcacgcgcgcgtagccggcggccggatcggtgccacgacgctgcgcaaggccttccaccagcgccgcgatattcagttgcagcgtgatggtgacgaacatctgcgccagcggcagcgcctcggccacgccgatgcgctggtcttccaggccgtcgaggcgggccgccagcgccggccagcggcgaccgagcgtgccgcggtcgatgcgtgccgcatcgttgtccttcagcagcaggcgcaagccatcgttggagtagaccagcatcgagttctgctggtttgactccagggcaatgccgtagcgcagccatagcgtcaggtgcagttgcagcgtgagcgcgaggtaggcgtcgaaccaggcatcgagatcgccgccatggtagcggccggcgagtgcctcggccacgcagttgccgcttgcggtctcggcgagcaggccggccaccgacaccacggtggcgttcgccagttgctgctcggggtagcggcgcaggatgtagcccaggaacggtcgctggtccacatgggcgccgttggcttcatcggtgaacagcacctgtccgttgaggcccggttcgcgccggacgatatcgccaagcagtgactggatgcgatggccgtcgccgatggtgctgggcttgatggtgcggatgttcctggcgcccagggtgcggatcgtgagcggcagcttgacgtgccacgcgggcgcatcgagcaggaccagcgagcgcaccgacagggtgggcgacacgcgcaggtatgtgcgcggcgcgcggatgacctggcagtcgagcccggcttcggccatgaagccgtccagatggtgctgccatacgaacggatgcacgggcaccagcgcatgcgatgcggcgagcgcgggatcgaggccgacatcggcgaaatccggccagttcggcggcagcgcgtcgccgctgggatgatggcgctcgcgcggcaccgccagccagttcaacgcgaatgcgggctggaactcgggcgcgtagcgggcgagatcgctggcggcaaagcccagcttggcgcgcgcggtggggtagtaggggtggtcgaggaagcccgcgacgcggtcatagtgcagcatgcgctggtcccatgccggcagcgcgtggccgtctgcgctgtgcggctgcgcgaaccagcgcgcgcgttcggccatcgaagccttgcggtgctcgaccgccgcacggcattcatcggcgtaggcggtgaacagccgtgcgtcttcggcaggaagatcgccggcaaatgcggccaggatggcatcgacgtcatgcagcgcggcgaacgctccggcgtcttcgcgcagcagcggcgggcgggtcaggcgccattcctgcatgtagcgggcgggcgttaccgggatccacaccgtcccggcgccaaggtgcgccacgcgcagccactgctggccggcgtcgaaaccatgcgcagtggcggcgggtatagcggcagtgtcgcgtagttcgccgcggctggcgcatgcgcggacatcttcgcgcagcaaggtgtcgacgacacgaacgcaaatataagccgcatccgcatccggcgcggcagagagccccggttcttcaggcaggcacgcggtcattgtgtgatctcccaggcgagcttgctactggccatctccaccgctgcggcaagacctttgaggtcgggaccgctgccgcgcagcacgcccaggtaatccttgttcgagttggttagctgaatggcgtcgcccaccttgcgcagcggctggtaggtcaggcgcacgccgtcgccttcatgctggctgtggcacggcgcatgcctcagcgtgccttcggcctgggccgtgaaatatcggatccaggccgcccgcttcggtacctcgagcgccggcagggcttcgcccaggtgcaggcgcaggacctgctcgaacagcgggaactgcagcgtgtcggacagcaggaactcgcggtagtcgccgatgctgcggtagttgatctcgatgaggcgcgggcccttcggggtcagcacgtattccgtgtggcaggcgccgaagccgatgccgaagcggcggatggtgtccaggacttcggcctcgaccgacgccggcaggccggtgccccatacggcttccagttctacgaagtacggcggcggcgacagggtcacgcggaagccgcccagcgcgcggatctccttgccatcgccgagcgtctccagcgtgtacagcgggccctccaggtattcctccagcagcagcgcctggccggggtgccggacccagatcgcgccgcaatgctcggccagttcggcgtggctgcgcgccaggctgacctgctggctggccacgccttcgcgcggcttgacgatgcacggcatcggcacatcggcgagggcagtcaggccggcggtatcgcagaccaccgcatgccacagcgtgtcgatgcccgactccgccagccgccgccgcatttccgccttgttcttggcggcgtaggtggtgcgccagtccttgcccggtaggccgaagtaggccgctgcaatcgccgtggccgtctgcaggtgatcgctgttggaaaagactgcgccgggcttgccacctcgtctggtgatggcatcgatggcagccagcggattaaagacatcgcacggaacaatatcatccgggtaggcgggcagccctgcgctagcgaagtgagcgcgatgggcatcggcgcaatcagtcagcatgaccacggacaggcctagtgctcgtgcggcaggcagaaaaccttcgttaatgggggcagtagggacgtgggcgagtacaaagatctcttgcatcgatatgtagctttatgagagatgttgcaaatacaaattgcaatgattcgtattactgtcgatgggtgaaatttcgtcgcggccatgcgttgattgaggttgccggagctagagaagggacggccctgagagccgccctctagtggcttatggccttacgacaagtttgtactgcggtgtggatgctttacatccggtaccgcagcgtcgccatcacgctgcgcggggcacccggcatgttcaggttggagctggtgccatgcgccgacacgatgtagcccttgtcaaacaggttgtacacgttcagctgcgcctcgaacgcgccgcggcggtaccaggccatggcgtcggcggtgacgtagccaggcagcgtcacggtgttgagcggatcggcatagcgcgcgcccaccaggttgaggcctgcgcccacgccgaagccgtggcccaggtccttcgtcacccacgcgttgcccgagtggcgcggcgtgatggtggcgcgcttgccctgcagcgcggcggtggacttggtgatggtggcatccaggtacgcgtagcccgccagcatgcgccagccgccgcccagctcggccgcgccggagatctcgatgccgtcggtgcgctgctcgccgatcggcagtagtgccgtgttggtggcgttggccaccttgatgttgctgcgctccaggcggaacaccgagatcgtggtgctggccttgccgttcagccagtcgtacttggcgccgacttcagtgttgttggtggtctcgggcgccaggtcggcgttgttggccgccagcgcaaaggcctcacccgacggctggaacgacttgctccacgacacgtagtacgactgcgccttcgacggctgccacaccaggccggcgcgcggactccaggcggtgtcggtgcgcgacaggtcgcgctggcctgcgatccggttcctggtctcttgctggaagttgtcgtagcgcacccccaccagcgccttccactgctcgctgaacttgatcatgtcctgggtgtagaacgccagggtgtcgaacacgcccaggttcgaggtggtcgggttgcccggcgccttcagcggcagcgtcatcagcaccgggttgaacaggtcgaacactgccgggcggccgttggcgccgagcaccggcttggtgttgttgacctggtccttgttctgctgcccgatctccatgccgtacaggatctcgtgctccatgcccaggaaggtggccttctgggtcaggtcggtctggttgaaccagccatgttcctcgcggcggacattgccgtggttcatggtcagcgtgcgcgccgcttcgttgaccgcggaggtcagcgtgttgttgcggtccagcgagtagtggtagtagcgcgtggcgttgcggatcgaccagttctggttgaagcggtggttgatcgtggcagtgccggagaacacgcgcgactgcgagtagtcggcatcgcgcgcattggccgcgccgtagtagcgcgaggccggcacgtcgaccgggcggccctggtaggccgggatgccgaagtcggtgacgcggcggtcttccaggtagtcggcctggaacagcacggtggtctcaggtgcgacgcgcagctccagcgacggcgcgatcgccttgcggtccaggaactgctgcgagcgatagctgttggccttctccacggcgccggtgatgcggaacgcggcggcgccgtcggcgaacacgcggccgacgtcggcctcggcgcggcggtcggcccacatgccgtagctcagcgcgaaatcggtgacgtcgatgccaggcttcttggtgacgcggttgatcaggccaccggccgagccacgcccgtacagcaccgccgccgggcccttgaccacttcgacgcggtccacgttggacaggtcgcggaagtacagcgcgtcatcgcggatgccatcgacgaactggtcggcgatcgcggtgaagccgcggatcgagacctggtcgcgctggccatcgccatgtgagaacgacacgccgggcacgttcttcagcgcgtcctgcatcgacgtggcgtgctggtcgcgcattacctcggcggtgaccacgttgacggtctgcgggacgtcgcgcagcggcgcttcggtcttggttgcgctgagcgcgttgggcgggttgtagccggcgcccaactcacggctgacgtcggccttgacggtgacctcgggcagctgcgccgctgcagtcggtgtcgcctgcgaccaggctgccatcggttgaaaaacgaaagtccccgccaccgcggcgcagatcgggtgaagctttattctcattcttcggctcatgttttgtaatgcttcgtaatattttttgcaaacgcgacgcattatcatttgcgtttgttggaaggtcaaccttttcttgaaccaattggggccgccgtcgtaatctatgggcggacttgcataagagccttatggagcatatccacccgaccggaagaattgcaggactcggattgtggccaagtgcgcgctacggggggcggactcggttcaaggtggaaaaagctgcgtgttgcgggggcggattggccgtaacgccagttcgcgagcggatacaaaggcttacaacgctctcaaccgcgagggtcaaccgtgaaaacccactgccgttacaggaggtaaccagctttagtttctgcacataccaaacaggacgaggacgctctaaggtattggcagcattcgacggaatcgcatcatgcaaaagatcttggcagtttgtgcaattgcagccgcgtcaatactcgtgtcaggtaccgcccaggcaagggtggacgtgggaattggcatcggtatccctggtgtcgttattgctgcgccgccgcccccggtgtactacgaaccggcccctgtctatgttgcaccacgccctgtaatcgtggcacccccgcccggttattacgacgacgattggcaagcgcgcgcctggcgcgaggaacagtggcgtgaacagcgatggagggagcgtgaatggcgagagcgccatcgcaggtggcaccgctggcatgacgacgattgacgctccggagcgctgtacttttgacgcgccggcgctgtacttggatgtcaggtcgcgtgccaaagacagtgggcgccttcagacgagatggcgatgtcgccgacggcgggcaggagggtccgataaaccatggcggtggtcccgattcgaagtcccagggcgcctactccaaagctggcgaaggtcgccgagatgacccgccacccattttgtatatgtctggacgcagccagtagagggttcgagcctacatcagccgcccggcacacggcaccacggtacgcattcaccaagcggtagcccgcgtagacctcctgagaattacgcactgcatacggcgcctcgtcaacagaagggcctctgcggccagccacaaggcccctctaacagagacttactttgcttacgtcgagtccttgagtcctcagcgggcagtgcttgatccagtcgctgagccgcttgcgctgccggctgagctagagcccgtgcccgacgcgctagattgagggctcacacttccggagccggatagtgatccggtaccactggtgctgcccgcggccgtacagccggccaaagcgcatacgattactagtgcgaacgcagtcgaggtcgtctttctcatcttgtgctccgtttattgggatcgggctccacggcatcgtaagcgcgcggtgatcccgtcttgacgacagcgccgcggtcaggactgcgggagttgccagtgatgaggcagaagctcctcgaggcgacttgcgggctgcgttggcagtcgtgtgagaacgtctttgagataggcgtagggatcgtgaccgttcagcctggccgactgaaggaggctcatggccgcagcagcgcgacggcctgcccgaagcgatcccgcaaagagccaattgctccggccgagagcaaccggacggatctggttttcgcaccagttatgccggctccccgattatgccgcgtcgtgcacgcgcatgacggtgggtatggcctttcatgatcgctgtgtcggcataaacatatgatgtctcaggctggctaatgcgctggccaggagagatcagatgaatgcaacacgcacagtcagcgaatccggcgggctgccggcccatcacatcgatgcatttcttgatcgtctacggacggcacactattccgaggtatcgcttcgcaagaaacgaagagtcctgtgcgtgttctccgggtggatgaagaacaggaacattgacctgatcgatctcgatgagtctgtcacggctcgttttatgaatcgcatgatcgacgcttcaagagaccgcgtccagcgtgcgcgtcccaccttacggcagtttcttgcctatctgcgcgcggaagccattgtgtgttcgccgacgttgggcggccagtccgagattgcgcgcatttatcgccgatacctggaccatctgaggcaggatcgtggactcgcgaagaactcgctgctcgtctacggccccttcattcgcgactttctcgacagccactcggccaacgacggaacgatattggcagatgcattttgcgccgtaacgatccgagatcatttccttacctacagcgaaggtcgatcggcggagtacacgcggctgatggcagttgcgcttcgctcgttctgccatttcctctttctgcgcggcgatacggcccgagacctgtatgagtcagtgccgtcagttcgtaagtggcgacagtcaactgtaccgacgttcctcacgcctgagcagcaagaagctctcattgcgtccgcagaccggtcgactccgactgggcgccgtgactacgcaatcctgctgttgttggcgcggctcggtctacgtgccggagaaatagttgccatgcagctcgacgacattcactggcgttcgggggaactcgtcgttcatggcaaggggcagatggtggagcacgtccccctgccatcggaggtcggagcagcaatcgctacatatctccgcgatggtcgcggagcaagtgcatcgcggcacgtattccttcgtagattggcacctcgggttggtctggcgggaccggcggcgattggcaagattgtttgtcaggccttcgcacgtgcaggtttccgccccgcgtgccgtggttccgcacatctgttccgtcacggtctggcgacgacgatgattcgccacggggcctcgatcgcagaaatagctgaggtcttgcggcaccgctcaccggacagtaccgcgatctatgcaaaggtcgcgttcgaggacctgcgcggggtcgcgcgctcgtggcccacggcgggaggtgcaatatgacttcgatccgtgactccctcgctcggtacgtggcggtccgccgcgctctcggggcatcattctatgaacctgcattggcactcggtcatttcgttgatcttctggaacatgaagacgcagagttcattactaccgatctggctctgcgctgggcgatgacgcccgcactcgtcgaacgcgccacctgggggcggcgcctctctcaagtgagaggattcgccagatggatgaacgtcattgacggtcgaaaccagattcctccagcaggactcctgagtgcccgcagacggcgcaatgccccgcatatttacacggagcaggaaattgatctgcttatgacccgcgccgctcaactgcgatcccgaaccggcatgcgagcactgacctattcgacgctcatcgggcttcttgtagcgacgggcctcaggccaggcgaagcgcttcggctcgaccggtccgacgttgacctcgtcagcgggatactctccatccgggaatcgaagttcggcaaatcgcgctttgttcctgtagcagagtcgacccgggtggcactcgaacactatgccaagaaacgcgatcaactctgtccttcacgattgagcgaggcgttcctggttagtgagcgcggcaagcgattgaaggccggaactgcacgaagcatgttcgtcagaatgtcgcgcgctgtcggtctgcgatcggcgacagaggatgggcgcgatggttacggcccgcgcctccaggacttccggcatagcttcgcgacgggaaggctggtcgaatggtatcgcgccggtctggacgtaagtcgagaactgccgaaacttgccgcctacctcgggcatgtcaacatcggtcttacgtactggtacatcgaagcggttcctgagttgcttgaactcgcggcagcctatctcgacaaggactgtccgggagaacggccgtgagcgccgccagcctcccagccctggttcagcgcttcttcacccagcgcctgctcgagcagcaaggtctgagttcgcatacggtggcaagttaccgtgacacgttccggctgctgctggcgttcgccactaagcatatcgggcgcgcgccgtcaaagctccgaatcgaggacttcgacgtgtcgttgatcgaggaattcctgcagcacctcgaacacggcagaggcaattctgtgcgcacacgcaacacgcggcttgccgccgtgcatgccttcttccggttcgtcgcagtcagcgagcctgcgttgtttctgcagtgtcagcgcattcttgcaatcccatccaaacgctgcgagcacggcccagttgagtttctgaccgagagcgaggccgccgctctggtaggggcgcctgacgtacgaaactggatcggcaaccgcgaccgaacgctgcttcttgtagcggttcaaacgggtctgcgcaatagcgaattgaccgcactccggcgtcaggatgtgacgctcggcacaggcgcccacgttcgttgccttggcaaaggcagaaagatgagatgcactccgctgcgaccggatgtagttgccgtcctgaaacagtggctgctgtatcaaccaggcgaaccaggtgatccggtcttccccagttcgcgcggtggtcatctcagtgccgatgctcttcagcgactcgtttcgcgcaacgctgagatcgcgcgcctctcgtgcccctcgctgaagaagaaatcaataacgcctcatacgcttcggcactatatgcccttcccgactatgtcttgtaatcgaaagatagctctctatttcatgggcaaacggatgcacggagatagagatagtcttgactccttccttcagccccagagcatccgggaaggagtccatcatgagatacaccatccatgaccgtgtcgttctcgcacacgcaccagaaggcccgctcgcgtcccatatcgtcgcctttgcgaactcgatcgctgtgcagggatacagtacgcagtcactgaagtaccacgttaggctcgttgcaggttttagccgctggcttggccgaaacggaattgacttgcataacgtctgtcctgatcacagtgcgcaatacttacgttatcgtgcgcggcacgtgcgaccgggtccgggagaccgtgctgcgctcaggcatctcattgattttctcgatcgtgagaggctgatttcggcgcagagaatgcctgagcgtcggctgacccctattgagtcctgtacacaggcttacgttgagtatctgcatgaggcgcgcgccctgtccaaagcaacgatcgtcaattacgtgccgttcataagggagtttctcgaagattgctttggtgacgggcgcatcaggctttcgcgtttgcgtgccggcgatgtcgtgaactttgtgcaatgtcaggcactgcgtctgcatctgaagcgcgcgaagctcatgactacagcgctgcgatccttcctacgttacgcgtgctatcggggcgacatgacgctcgatctggccgccgctgttcccgtcgtggccaactggtcgatgcagtcaatccctcgcgggattccaccagagcagatacagcaactgctggtcagtatcaatcgacggactgccgttggtcgtcgtgattacgccatcatcctgctgctcgcgcgcctgggactgcgttctggggaagtggcatttctcgagctcgacgatattgactggaacacaggagttttaagcgtgcgcggcaagagtggccagcgtaacgggctgcctttgcccgccgatgttggaaaggcgattgcagcataccttcgagacgggcgaccgcagagcaccagtcgccgtgtgtttttgcgtgcaaaggcgcctgttatcggctttcgtggtgcgagtggcgtgggctccatcgttcggcactcgctccagcgcgccggcatcgacgccccaaccacgggggcgcaccagtttcgccatggactggcctgccagatgctcagtcacggcgcgtcactcagtgagattggtgagttgttgggacatcatcatccgcagaccacgaagatctacacgaaggtcgacatcaaggcattgcgtaccctggccgtaccgtggccgggaggtgtgcgatgaacacgctgcggcaggccgttcaggagtatctggacctcaggcggagcttgggcttcaagcttaaagatgccggcaaggcattgcctgatttcgtcgcgtttatggagaggcaccgcgcttccttcatcacccaggcattggctcttatgtgggcccagcaaccttccaacgtccaacccgcgcactgggcgcgacgactcagtatcgtgcgcgagtttgcacgtcatcgtagtgcgaccgacccacgcacacagattcctgcaccgggtctgctgccgttttcgccgaagcgggcccgaccatacctatactcgagcgatgagattcgcagactactccatgctgcgcttcagataccctgccgctacgcgcgcgacgaactgcaaccatggacctattactgcctgtttggcttgctgagcgtttcgggcatgcgtctgggcgaagcgcgcaatcttgagcttcaggacatcgatctgacggcggcaatattgacgattcgcggcgccaaacttggcaagtcccggttcgttccaatgcatgcgtcgacctgcaaagtgctcgcggactatattgcacgacgcaaacgtcattgggcggggcgacccgtgtcctcctacttgttcgtgtctaaccagggcaatcgtctggatagtggagagattcatcgacacttctatgcattgtcccggcagatcggtctgcgtggcgcagccgacagtcacggcccgcgtctgcatgacatgaggcacgtatttgcgacgaatacgcttttacgctggtaccgttccggacaggaccccgagcgccgcctgcccatcctgtcagcttacctcggtcacgtccacatcgcggatacgcagtggtatctgaacgcctcgccggagctgatgcgcgaggcgatgcgccggctggaacagcgctgggagattcaaccatgactactaccgccagtctcgctccgttgctggagcgtttttttacgcaacgcctgatgcagcagcgccaggcgagtccccacacgatcagttcctatcgcgacacctttcgtcagttcctgaagttcgcgcagcaacgcctgcaccggcagccttcacgcatgaatttcgaggaaatcgatgcccctttgatcgttgcatttctcgatgacctggagcagcgtcagggcgtgagcgttcgcagtcgaaatcttcgcctcacggcaattcattccttctttcgttacgcggcgctcgagacgccggctcattccgctcagatccagcgggtgcttgctatccccagcaagcgctttacccgcaccctggtgcaattcctgactcgccaggaagtcgatgccctgcttgccgcaccggaccagcgtacctgggccggccgacgcgatcacgcctttttgctggtcgccgtgcaaactggccttcgcctgtccgagatgaccggactcaaacgcgatgaccttgttctcggaaccggtgctcacgtgcgggtgattggcaagggtaggaaagagcgttgtacgcccatcgtcagatccacgctcgccgtactgaaagcttggctgcgggaaccccagcgcggtgaggacgacgtgctgtttccaagcgcgaggggcgaacgcctcactgttcatggcgtgcagtatctgctaaacaagcatcgagagaccgcgtcaaaaatttgtccatcgttgaagcagaaacaggtcaccgttcaccgtttgaggcatacgatggccatggaccttctgcaggcgggcgttgatcgttccgtgattgcactgtggctcgggcatgaatcggtggaaaccacgcagatctatctcgaagcgacacttgcgatgaaggagcaggctcttgcgaagacatctctggctcacggcaagccaggacgctaccggccggcagacgaacttctcggcttcctgaatggactgtagggccacgaaactatgtcgggtagtgacgggggatggctccacaacaagtgcgcatcggacgagcacggaggcaaatccctcattacccgatatagtcaggaagggcatatagtgccgaagcgtatgaggcgttattgatttcttcttcagcgaggggcacgagaggcgcgcgatctcagcgttgcgcgaaacgagtcgctgaagagcatcggcactgagatgaccaccgcgcgaactggggaagaccggatcacctggttcgcctggttgatacagcagccactgtttcaggacggcaactacatccggtcgcagcggagtgcatctcatctttctgcctttgccaaggcaacgaacgtgggcgcctgtgccgagcgtcacatcctgacgccggagtgcggtcaattcgctattgcgcagacccgtttgaaccgctacaagaagcagcgttcggtcgcggttgccgatccagtttcgtacgtcaggcgcccctaccagagcggcggcctcgctctcggtcagaaactcaactgggccgtgctcgcagcgtttggatgggattgcaagaatgcgctgacactgcagaaacaacgcaggctcgctgactgcgacgaaccggaagaaggcatgcacggcggcaagccgcgtgttgcgtgtgcgcacagaattgcctctgccgtgttcgaggtgctgcaggaattcctcgatcaacgacacgtcgaagtcctcgattcggagctttgacggcgcgcgcccgatatgcttagtggcgaacgccagcagcagccggaacgtgtcacggtaacttgccaccgtatgcgaactcagaccttgctgctcgagcaggcgctgggtgaagaagcgctgaaccagggctgggaggctggcggcgctcacggccgttctcccggacagtccttgtcgagataggctgccgcgagttcaagcaactcaggaaccgcttcgatgtaccagtacgtaagaccgatgttgacatgcccgaggtaggcggcaagtttcggcagttctcgacttacgtccagaccggcgcgataccattcgaccagccttcccgtcgcgaagctatgccggaagtcctggaggcgcgggccgtaaccatcgcgcccatcctctgtcgccgatcgcagaccgacagcgcgcgacattctgacgaacatgcttcgtgcagttccggccttcaatcgcttgccgcgctcactaaccaggaacgcctcgctcaatcgtgaaggacagagttgatcgcgtttcttggcatagtgttcgagtgccacccgggtcgactctgctacaggaacaaagcgcgatttgccgaacttcgattcccggatggagagtatcccgctgacgaggtcaacgtcggaccggtcgagccgaagcgcttcgcctggcctgaggcccgtcgctacaagaagcccgatgagcgtcgaataggtcagtgctcgcatgccggttcgggatcgcagttgagcggcgcgggtcataagcagatcaatttcctgctccgtgtaaatatgcggggcattgcgccgtctgcgggcactcaggagtcctgctggaggaatctggtttcgaccgtcaatgacgttcatccatctggcgaatcctctcacttgagagaggcgccgcccccaggtggcgcgttcgacgagtgcgggcgtcatcgcccagcgcagagccagatcggtagtaatgaactctgcgtcttcatgttccagaagatcaacgaaatgaccgagtgccaatgcaggttcatagaatgatgccccgagagcgcggcggaccgccacgtaccgagcgagggagtcacggatcgaagtcatattgcacctcccgccgtgggccacgagcgcgcgaccccgcgcaggtcctcgaacgcgacctttgcatagatcgcggtactgtccggtgagcggtgccgcaagacctcagctatttctgcgatcgaggccccgtggcgaatcatcgtcgtcgccagaccgtgacggaacagatgtgcggaaccacggcacgcggggcggaaacctgcacgtgcgaaggcctgacaaacaatcttgccaatcgccgccggtcccgccagaccaacccgaggtgccaatctacgaaggaatacgtgccgcgatgcacttgctccgcgaccatcgcggagatatgtagcgattgctgctccgacctccgatggcagggggacgtgctccaccatctgccccttgccatgaacgacgagttcccccgaacgccagtgaatgtcgtcgagctgcatggcaactatttctccggcacgtagaccgagccgcgccaacaacagcaggattgcgtagtcacggcgcccagtcggagtcgaccggtctgcggacgcaatgagagcttcttgctgctcaggcgtgaggaacgtcggtacagttgactgtcgccacttacgaactgacggcactgactcatacaggtctcgggccgtatcgccgcgcagaaagaggaaatggcagaacgagcgaagcgcaactgccatcagccgcgtgtactccgccgatcgaccttcgctgtaggtaaggaaatgatctcggatcgttacggcgcaaaatgcatctgccaatatcgttccgtcgttggccgagtggctgtcgagaaagtcgcgaatgaaggggccgtagacgagcagcgagttcttcgcgagtccacgatcctgcctcagatggtccaggtatcggcgataaatgcgcgcaatctcggactggccgcccaacgtcggcgaacacacaatggcttccgcgcgcagataggcaagaaactgccgtaaggtgggacgcgcacgctggacgcggtctcttgaagcgtcgatcatgcgattcataaaacgagccgtgacagactcatcgagatcgatcaggtcaatgttcctgttcttcatccacccggagaacacgcacaggactcttcgtttcttgcgaagcgatacctcggaatagtgtgccgtccgtagacgatcaagaaatgcatcgatgtgatgggccggcagcccgccggattcgctgactgtgcgtgttgcattcatctgatctctcctggccagcgcattagccagcctgagacatcatatgtttatgccgacacagcgatcatgaaaggccatacccaccgtcatgcgcgtgcacgacgcggcataatcggggagccggcataacgcggttcatgccgctagcggcatgaaccgcgttgttcgagatcggccaggttccgttctcgatgtagcgcacgagctttggccactgcccatgcaggtagtgcagcgccttgccgaacaggctttgcggcagtacggtatgcaggtgttgcagcagcatcgtttcgatctcggccagcagcggctggctttgttcggcgcgaacttgctgccgttgttccggcctcatctcgagcgtgtggcgttcgatggcaaacagcttgccgatgcgctgcaggaatccggtgaccgtgtggtcggcgcgcttgtccttgggcaaggcttgctccgcctcgaccaggtagcgccgcgcgtgcgcccagcatccgaggtgcaccaactgataggtgtttgcgacgtcgtcgtatggtgcatagccgtcggtcatcaacaccgccccaggcttgatgccggcatagagagccgtagcctgctttgtctcgcgtgtggggctataggcaaacaaccgtaccggcgggcccgtgccattcatctgcgcccataggaagctctttctctgggcaggcctgccgggctccttgagcacctgtaccgttgtctcatcaccgtacacgacgtctgcttccagcagatggtcacgcagcaggttgatgattggctgcaccgcttggcctactcgcactatgcttgcggccagggtgccgcgagagaggtccccgccgaagcgatgcagcagcgctgcctggcggtacagcggcaggccatcctgatacttcgaggtgatgcaccaggccagcgccgattcggtaaggagtcccttgggaataatgcgtgccggtgccggcgtcgtcttgatgccgccgtcgcagcatgggcaggcgtacttgacccgctggtgctggatcacgcggacctgttgcggcacgatgtcgagctgttcgctgacctcaacgccaatctcgaccagagtctggccatcgagggggcagacgcgttccgattcgggtagttcgtgacgaacctcgacacggggcagcgccgggtcgagcggcttacggccacgcttcttgcgtgtgtgcccggccacttcggtctcgggcgtaccttcttcttcctgcgccggctgcgcggccgctgccgccatggcttcggcctcattgaggaacaagtccttctgctccgagcctcgcgcctcgctcttggcggcgaacagcttacgctggaacgccttgagctgttccaagagcaggtctcgctggaccgtcatcacacgcagctcgcccttgattgcctcgcgttccgcgagtattgccttgagctcgcgctcggcgtctcgcaacagttgcagctcggcggcggtaacggtgacgggcgtggatggcatggcgggttagaccgctgccgccaagcagcgttcacgcagcgcgatggtattctcggtgcgggtgccggcgcatcgcctcgatgtcaattccctcgagcagccagtgcaactgttcgaccgtcagcgtggccaccgacgcctcgcgtggccaagcaaaccggtccgcctccaatcgcttcaacagtagccagaagccgttgtgatcccagccgagaatcttgatgcgatcggcccgctggttgcggaacacaaatacagcagatgcaaacggatccagcccgagcgcctgctcgaccagcagtgccagaccgttgatgttcttacggaagtccacagcgtcgcgatgcaggtacacccgcagcccagcgtcgaggcgaaacatcaatggcctccattcagggcttcgatcattgcccttaggggtaatcgtccttttcttgcagattgatacggttatcaatcagcccagagtcccttgttggcgtggcgttgcagcccattcgttgaccttattgcggccatccgagcacttgtcgtacagttttgacccgaacgacaccccgaaaagtgtagatgtcggcatttgcgtatcgctacgttggcagggaagagttgcctgcccgcttgacagaatttgacctacggcagttttttcagctcaccagtgctgacatcgcggcaatacgggagcggtttcgggccgacagatacgccgcggtcggcctacaactcgtttgcctccgggccttcggtcggccgttggaccggtttgctgccgttccgcgaaatctccttcagtacgtgtgcgaaactttttccgtgccgctgttgtcgattgccagtctgaagacgctgtaccaacgacgcccgacgttgtacgagcatcagcaatgggtcaaggagcaccttggcatcaagccgttcgatgacaccagccaggccgctttgctggaaatgctccgcgtgcaagctgccgcagcggcagacgtggatgagcttgtcaccaccgctcagcgatggctctacgatcgctgccgcctcattcccggccagcgccagatcaccgacatggcacggcatgcattttccgcctacgaggcgcaaatgctcgcagcggttaaccgcgcagtgccggcggccacgctgcagcactgcatggaatccgtccgcagtccacgggctgacggctctgcaacgcacctcgagtggatcaaggcgccgtccaggcgcaacggccccaagaacctcgctgaaacgctggacaagatccgctacctgaagtccctcgctgtgcacgagtggaatctggatgacatcgctttgcccaaactgcgtgcctatgcgcagaaggtgcaagcaaggcgtccggccaagaccaaagcactgaaggagagcacccaggcgcttgaactggtgtgctttctacggatgagtttgctggaactcaccgatatcgcgatgcaccagactagccgacgcagccaggatctgttccgacgcgcggccagcacggcgcagtcgacgcacacccgctccgccgtggaagacaggcagcaggcgctcaaggccaaggccgtcctgcaagacaagagcaagtcgaccgagcagcgagtggatgaagccctgaagcaccttgccgtcgtcaccgacgcggcgcattcgagctttgcgtcacacgtgcgcgcggcgctgaccggtgaccatcagcggattcacgctctgctgtcgggcctggaaggcctggaattcggcggcagggaggacgatcccggctttgcgaacctcaaggcatggcgcgacctgcagacaaggaagctcaatgctctgccagaagactttaccgaaagcggcgttggcacggcgtggcatgacctcgtccatgatcctgacccaaagcgcggctatcaggccttctctgcctgcacgatgatgtcgctacgaaatagcctgcgtcggggcagcgtatggattgaccactcgatgcgctttcgtgatcgcgaccaaatgctcatccctgccaaggagtgggagcgcgaccgtgtcaagtatctcgggctattgggcctgccagccgcggctgatacctacatcgaacagctactggatacgcttcgtgctggcgtggctgctgtggccgaggccaccgctaacggcaagatcgaaataggagacgatggcatgcttcacctgccggcgattgtgccgctggagcaggacgatgaaccgcgccgcacacgcgacttgatctacaagacaatcggcgatgtgcaattgccggacctattgctggaggtcgacgcctcgaccaatttcagcgaggtgctgctcgggcaccgggcgaagtccgtgcccgaactgctgtcgacctacgcggcgttgctcgcccatggcaccgagatcgatgccaagggcattgctgcgatgattcccggcatcgacaccgcccaggtgtcacttgccatgcgagggctggagacccatggccgtttgcgccgggccaacgaggtggtggctgaatttcaaggaaagatcccattagccacgaactggggcaccgggcagaaggcatcggccgacatgatgtcgctggacgtttcacgacatctgtggatcgctcgtgttgatccacgtcgacgcacctacgcgaccggcatctacacccacgtgctcgataagtggggcatcgtctatgaccaaccgattgtcttgaacgagcgtcaggctggggtggccatcgagggcgtagagcagcacaaccgctgcgaggaccgtatccgcctgtcgttactggcagtggacacgcacggctacacgaacgccgcgatggcctgggcaaagggcttgagtttcgatctatgcccgcggctgcgcgatctgtcggagcgcaaactgtatctgcctgcagagtttaaagtgccagaagggatcgagcgtgtcaccacgaagcgcttgtccttgagagccatacgcctgggttgggacgatttcctacgggtgctggcatcgatccgtatcggccgcattagcgctgagctcgccatgcaacggttgggcagcgctgcccggaccaacagggcacacaaagctgccgagcatctcggccggctgttgcgtagcatcttcctgtgcgactacgtgaccattgaagacttccgccgcgaaatccatacgttgctcagccgaggggagtcggtgcaccagttgcagcgcgcgatccatgctggccgggtgccacacgaacgcggccggcgaggcgatgagatgacggcgatctcgggggcgcacgcgcttctgaccaacatcgttctggcgtggaatacccaccgcatgaacgatgtcgtcgagcgacttcgcaagggcggcacgaacatcgaggacgcttggctgcgccgcatggggccggggcattccgggcacatcaacttccgggggatcctcagcttcggtgtcgagcgctacattgacgcgctgatccgaggcagtggcgcaacaacccgacgggctatggcataactgccatcgaacgccgcagagcaaaatctgccacagattggcacaccgcagtggctcgaggccgaaatacggcagtaccttcgcagcggcagctacgacagcagcttcgcaggccggccaggcatactggcgagacagtgcctgccaaccgcgtaccaatccgcaaagaaaggacggtgcagcgcgaaacgaagaaccgctaagtcattgttctagaacgtctttttaagcctgaccgtatcaatctgctgcaaaaggacgattaccccacgatgagcaggcgcgcaaaacggtcatcaacctgcgcgaccagttcaacagcttccaggacacggcgacccagcgaattgagcagaacagccgcaccacgctcgacctgcagaaccagctcgaaggtctacgccaggaactggcgcggctacgcggccagaacgaagtgctgcagaacacggtggcgacgctgcagaagcagcagaaggactactacgccgatctggatgcgcgcctgaagaaattcgagccgcagcacgcttcggtcgaagaccgccaaggcacgtcgcagccgggcgagaagcccgaatacgatgccgcgctcaagcatttccaggcgggcgacttcaagagcgccgggaatgcgttctcgtcgtttatcaagaagtatccgcagagcccgtacctgccgctggcccagtactggctcggcaactcgctctacgcgcagcgcgactataaggggtccacctgggtgctgcacaaaatgatcgatgccaacccgaggcatcccaaagtgccggacgccatgatcgcggtggccaataatcagctcgagtccggccagaaggctgccgggcgcgaaacgctggaacaggtggtggccaagtatcccggtaccgaaggcgcgcgtgcggcggacaaccggttgaagacgctgaagtgagcggggcggcttccagcaagccgcaccacgcgccgaaggcctgctttaggtggattttcagattcttacgaaccctacattttccggagtgtggggtctacgatgaccctgaaaaggtcctgccggctggctatacggggggatcgtgctttcgctgcaaaatgatacgcctgcgcacgaaattctcgtttgaaatcaacaatttgcacacaacgactttcccacgaaaagctctgtgcataactcgttgatacagaacggttttcttgctgaaaccgtggcaatcagcaccgaaagcacgataaccccttattgggggtacgatcgctggtcggcggctacgcccggtttgtggagcacttgatggcgacctttgacgatctgatggatgatgctgccctgcgtggcaagctgcttctcgcgatgaggaaggcgctcgtcgctagattcgaaaaactggattggattgaccttggattcgagcatgaaattggcattaagcaacggatccttcagggtagccagttcaagagtaatgacgactatcccgatcttgtgcatgacttgctggtgcgcttgtatagcgagaagcccgcggtgctgaaagcgctggtgctgcatccgcgcttgcagtcggccatcgaggccgatgtgccacaggtggttgcggccgtgagcgggacgccccatgtcactgtggcggccgcagacgctgagtcgtcgagcgagatcgtggtgcgcgcgctgcgcgacgcggaaacactgattcggtccggtggcggcgccgagagcgctgtcgaccggctgcataccgccctgcatggctatcttcgccacgtctgttcggaagcgggcttgtcttatgcggacggtgcgaccatcggcgacctcttcaagcttctccgggaacggcatccggcgtttgcgaacgacggcccgcacaagaaggaggtcgatcgcatccggcgtggcatgggccagatcctcgacacgcttgggacgctgcgtaaccatgccagcatggcgcatcccacagaggcgctgctggcgcgcgtggacgcggagttgacgctaaatgctgcgcgcaccgtctttaactatatcgcggccacgatcgcgtgacgtcacccggcctgtaccgcaccagtatgcggagccacattcgcgctggcgcgcggtgggtggggttggttcaggtaggttctgggcgccgccatgcccagtaaatggataacaattcagggaagatatgttcttggcacttgaaaagctgttgggggacgatgcgaagcgcaacaaggcctttgcaacctttgcaaaggtactcgaaaggcggttctcggaatcggactgggccagtttcgggcacgagcacaacattgaggagatctatggcaacgaccatctcctgcggtcggcccagtacgggaactcggactataggctgtgcatcttgcgaacgctcgaattccttttcgatgactacgccaaggcgctcaaggcgttgctgaccgatgcgtcgttgcacaacacgctcaaacgagaggacccggatctctacgccattgtgacggatgaagaggtcccgcatgtccccgcgaagaagccacgccgttcgaagctggaggtggtcaggaaggctttgcatgatgcggagacgctgctcgcatccggtggccccacgagtgccgtggatcgggtgcatacggcgctccacggctacctcagggaggtctgcgacaaggccaagctctcgtacggggcgcagccgacagtgaccgagctctacaagctgatccgcacggagcacccggctttcgatgcaaagggcacccatgccgaggcgatcaagaaggttgctaacggtatggccagtacgctcgatgggctgaatacgttgcgcaatcaggccagcgtcgcgcatccgaacgaagatctgctggacgatgtcgatgcgggacttgccgtgaatgccgcgcgcactgtattcaactacgtggccggtaaggtcggcgactgaagagccttctagtgtgcaaaaaagccggcggggcaggggatctcggcgcgcggtgcgagtccagccgtggccggctggggtgggttggggttggttgctggttggttgggaatgccggcgagtggtcccggaaggcatttttgagggaccgtggaaggtgaggggaagcgagatggatctcgtgagcgagagtccgtctggcgagggggcgacctgacggcgcgccgggcaattgggcgcgtggcgcgccgtgggttaggttggtgtggctggttgagacaccacgctcgtccagcgtatttacggcttcaggaatagcgagatcggcacgcatggagatacagaccattagcacgcaagacggcgtcacgcggatcgatcgacgcgattccgagccgaggatccgtttttcaccgttccatggcgataccaatgccgaggcgtccgagcggcgtgcggctgccatcttcggcccggtggagatttgtgacccgtggacgagtgcgccgccgtcgccggagcagatcgcccgcattgtggtccttcatggcgtctatcggcctcccaagacgtttcttccgtcctcgccattccagctcgtgccatccgagtttttgcgggtcgccaagcagcggccaccccggcagccgggggcgtccgcctccgcgtttgcgcaatggatctactcgctctacgccagtagcgagggcagtgacgatgaccgcgagagcggtctggcggcggagcccgagattctcgctttccggcatcgcgccttgcgccttgttgatgccgactatctgcaccagcagcacgcggcgtgggaactcgcgcattgtggcctgcaccacggcgctgacacgatggtgtcttacttccatctcgatgacctgcgggtcaacggggaaccgttgcgcgcgtcccccgatctcgtgtatcgccacaagacgaccggtgaggtgatcgtggtggagatcaaaatgtcgaggatggccattccgagcaacctgtggcccaacgtctggggccagctgtggtgctacgcgcagctgccggtggtgcgcgcagccagtcgggtgaccgtcgtcggcgaagtatgggcggagcgatccgagcattcgcgcgggcagggtgacgattggcagcgtttgccgccgtatctctacctgcgggcctctgtgcgccgcgatccgcgcgaggcggtctacgatcgcttcttccgggcgctctttgacatttatcgaggcgctggcggcgggcgatgatctcgcgcctttatcggcgatggggcggccactgacaattcagggatggggaatcggcacgaatggagacaccaatcactatttcgcgtggtgggcttacgcggacctaggggtcatcgtacctttggtgcgaaatctggtgcttggaagctggaaagctgcttgccgcaaggctttccagattacttcgcgccgcccgtgaggatcgaactcaagatcccttgaccccaccgcccacgggtgggacgcgttcatttcaattcgtccttctcgagcagattgatacgttgttgctccaaaaacgcttgtgattcaagagcttgcagaagaagcaatttctcaagcgaagcgaaccggaaagccttgctggaagcagcttcccatggaccgttacattttgcacgtttcgaacgtttacccctgatgcggggacgtctctggtgatcaccgccgcgcaacaccgcccaaccgatgctcccgttctccgcacagtgtagcgacgcccttatgcgatcatgtgccctttaccgtcagtcccccatttgtcaatgactcgcttgcgcaaaatcgagatccgccactttcgcggcatccagcatttcacctggtggccgggccctggcctcaacgcgttgatcggacctggtgacgcgggcaagtcgagcattcttgacgccatcgatctgtgcctgggcgcgcggcgcaccgcgcaattcggcgaccatgattttttccgcatgaatgtcgaccaacccatcgtgatcgagattaccgtgggcgagctcgacgacgcgctcaagaactttgaggcgtatggcctgtacttgcgcggcttccgggcggaggacggcgccgtgctcgaggagcctgacgcgcactgcgagacggtgctgacgattcgactgacggtccaaagcgacttggagccgcaatggcagttgatttccgagcgcgctgcggcgcaggggctgacccggcacctggcctgggccgaccggcttcggatcgcgcctggctggctcggcgcaagtggtgatcagaacctgagctggcgccgcggctcggtgctgaaccggctttccgacgaaagagcggatgcgtcggcggcgttggtgcgcgccggacgcgacgcgcgcctgcgcttcggtgatgaggctcagaatcaattggggcaagcgctgcagcaggtgctggccactgccaccgagctcggtgtgccagtcggtggcgaggtcaaggcgttgctggatgcccacgccatttcggtgacgggcggcgcgattgcgctgcacgacgccgcaggcgtgccgctgagatccctagggctcggctcgggccgattgctggtggccggactgcaacgggccgccgcaatggagacctcagtggtgctagtcgacgagattgagaccggactagagccgcatcgaatctacaggttgctcgttaccctgggggccaaggaaccggcaccgccgctacaggtgtttctgaccacccattcgcccgtggtggtgcgcgaactctcgggcgcgcaactctacgtgctgaggcaacgcgatggcgtgcatgtcgcgcattgctgcggaaccagcgacgacgtgcagggcacgatgcgccgacacccggaagcgctgctgggaaaaagcgtcatggtgtgcgaaggcgcaagcgaagttggcctggtgcgcggactggaccagtattggtctggctcgccttccatctcgacgttcggcgtggtcctggtcgacggctctggatcgtccgccgtgcaacgcgccatggcgttccaagcgctcggctaccgggtggcgctcttgcgggacagtgatgtgccgcccaaggtggacgaggtgagtttcaaggcggccgggggagaggtatttgcttggcgtcagccgaatgcgctggaagacgagctgtttcaatccctggccatcgaatctgtcacccagctttggcaactggccaaagagaagaagggggaggatctggttgacgcgcacctccggtcagcgagcgggaacaaactcactttgcccgaaatcgagaagcagctgtatgtggatagggtgatcactaatgaagcgcggctcgctctcggccaggcctcacgcaatagcaagaatccctggtttaagagcgttacggccatggaggaagttggcttcacaattgtcgggccagggttcgagagcgctgagcccgcctttggcactgaggtggctaaactgttccagtggtgtcaccaccatggctaattatgaccttgaccttcttgaactagccggcgcgcgggtagaagcgccggccggttgcggcaagacgcagatgctgacgaatgccctaatgcgtcacgggcaatccaagccgatcttgttgctcacccacaccaacgcgggcgtggccgcgctgcgcaaacgtcttgagcatgctcgggtggacccgagccgataccggctcgggactgtggatggctgggcgatgaagctggtcgcgacgttcccggcgcgcgcgggcatcgacccggcgctccttgccgccctacggcccgactacaacgccatccgcgaggccgcggcacggctgctggcgggaggtcacgtgggcgacgtgctggcgtcgagctacgcgcgcctctgggtcgatgaataccaggattgctcggtccgccagcacgccattattcaggcggcttcggcatttctgccaacctgtgttgtcggggatccgttgcaggcaatcttcggtttcggcggcgatccgctggcatcgtggcaggacgacgtgtgtcgacatttcccgaggctcttcacgctcgatcgaccttggcgctggatcaatgccggtgcagaggtcctcggtcagtggcttttgcaggcgcgccaggtcttgctgaatcggcagccgatcaacttggcgagcgcgccccccgccgtgcaatgggtgcagctcgatggttcggctggggatcacgctcgccttctccaggcagctggcaccgcggcgccgcatcgggacggcacggtactcgttatcggcgacagtaccagtcctcagagccagcaacggatggcaagtcttgtgccgggagccgtcacggtcgaagccgtggacttgcgcgacttggttgacttcgcgaccggtttgcagctggcagctccggaggcgctcaggcgcgtcgtcgaattctgcggccggctgatgaccggggtcggcgttgccgcactgctggagcgagtggaaatcctgcggcgcggcacagcacggcgagaaccgagcctggccgaagccgccgcgctagcgttcgaagccgaacgctcgctacccgccgtcaagcggctcattgaggcagttcgccagcagccggggacacgagtctttcgccctattgtgctgcgcgcctgcttgactgcgctcgacacctctagtacaggcggcacgacgctgcaggaagccgcgattcggattcgcgagcagggccgcatgcaagcgagagcgctgccacggcgggcggtgggtagcacgctgttgctaaaaggactggaggcacacgtcgcggtcgttctcgctgcggacaccttgaacgcgtcaaacctttatgtcgccctgacgcggggctcgacccaactggtggtgtgctcacgcactccgcaactgctgggacgttgacctctcgggaaaggacgtggcggccgtagaatcgcggattcctttgcctgcaatgccaataaaaaagccctgcaacagcagggtttttttattgagcaagcgcatctaccaatcgtcagcgacgtgcgccggcgtagacgctgaagggaccgtgttcggcttcccacttgcgagcgatctcggcacgctttttcaacgcctccacgctcatttccggacgggcgaacagagcgcgcacgcgcgcgacggcggccgaatcagcctcgttcggacgtcgaacctttgcaacaagtcgaggagcgtttgccttgcgatccatggtgccgttccaatgtgttgccgaaaagtgcttcggcattatctcggaatgtacatccgtatgccctcgattctaccgggttttcgccggccgtgccatcatgctcaccgaccgaccgaccagcttggcggtgcggtagccgtgctgttcataataaggcacaacttgtgcgagtggcttatcaatcactatctgcgccgagttgaagtaggccgcgatgacatcaaggataacgtcgatggccacaaagccacggccctttaggaagtcgtcggtcttgtctcgctccaggaagagtagcttggtcagcaggccgcccttggaaacccggatcagactaagaatgcaaacgatatcgcgagttcgaatgccgataaagcaactttttgtcgccgagctgcattttttccgcgcgccctcccaatttagcatcggctggctcgcccaccctcgcacgacttctggcacggccgacgtatgaataatttctgcccgcgcggcagggtcctcgaacagagcatgtagcgcttcttccacctcgtccagcgcctgttgtacctgttcaatgaacctcttgcgggcctcagatcgtgctgacataagtctccaaagttagccgccgcttcgaagcgcggtgccgtcgggaatggattctaacgaaggaagtggggcggctcgtgacgaataagcaacagctcgctacgttggaaattgcgggcttttttcgtcaacttcagctcgcacgctgcaagcacagagcgaagagcaggacaaagaacagggtacgctcctccctcaacccggatgacggcaaccgtggcaacgacggcaagtgacaaagagcgggcggacgcgatccgcttgatccagacctagatggacgaacgctgaacgagttggaggcgggcggggtgctttgatccgccgccacccgcccctccgccgccggtctgctaccgcaaccccagggcatgagctgggacgggcagggcgagatgcccgattggctgcggcgggcggtcaatgccgggcagagcgtggaatttttcctgggccgagagttgcaaccggctctccaacttaaggagtcagatttctggctgaggccgctcccgcgcaacggggatacaatatgttgggagaatgaagaatcccatcactacatatggtataaatgcgagatgtgcggactttgcttgggactgaccctgagtgcagatttcacacgcgtgccgccttaagcgaggaacagtgtctctgccggaccttccctttccatacggtaagcttcaattccgaccaatcacccgcgtgagcgaagcttcgcgtgttgtactggtggggcaagtctgttctcctgtctcactcgcgcgctttaatgcgcacgtaaagctgcttccggagaaggaattcattgcggagtccgcgtgcgcgtggctggccagacaggtgggactgcccgcgcccgaagcgatgtggatctgcgtatgccggagcgcctatccagccgcgtggccgtatggggacgaggacgtgcacgtctgtttcggcacccggtccataagtaatgcgctaccgcttaaagttgagtcttccaccgccggctggctcttccagcaagatcgggtcctgctcatcgcaaagatcgcgcttttcgatgagttagttggcaacgacgacaggcatcaaggcaacctcttgctaggaccaactggcaacattctagtgattgaccatgagcgagcccttggtggaaccgctgctgggctcttctccagtgacctgataggtcctaatcatcttttggagcttgtcagggagctgcctgcgaagcaaagggcggagcttaaagcgccacttctgcagtttgcgaccgcttgcgccgttgcggttgatcggctaccgttcgaccagatcgccgaagccaatccgacgcttaaagaggcggccaaacgattcttagcaaagcgcgccgcgtccctgcacgacgtagtgcttcggactctcggcgtaccgggtctaccaggtatttctgaagtccccctccgatccgcaccgctatgaaccaccttgtgttgcacttcgaactgaatacacctgcatcaggcgtggtcagcggccaggctcggctcgccaatcttgttttcgaggcttccggtgaggcgttggccatcgcggtgctcggccaatactctgattgcaccccattcgcgcgagtggtgacgccgaaaattcttaagtgcctgccccaggaactaggtcatgcatgtcataccttcggaaccctactggttgctgactacctatcttggtccaactcgggtaaagagttcgccgactggcgcgctccgctaggtggtatccgtttgggagagccttttgacattgatgctgaagacgaagagggagtggtcgtcagagctcttgatcgctgctctttgtatagaggacgcgtcgacttggcatcgagagccgaggaaactgaccctaggcctatacatgaagcgcgcttcgccaaatcggtgaaggatgaggtcttgtccgtggcgcccactcttgcacagggattcaacagaagcttcagcctaactgggacgacatccggcttctccatagactatgtcggccacgcttacgctacttgctacgctgccattaatccgaaggctaaatccatggtaagaaacaagacggcagcggctgctctctggcggcttgcgcgcgcacgtgacgcttttggatttgctacgccggaatccattgagttgacggcttggataccggcgcctgggcaacccatttactcagacagcgagtatgcggaagtcagcgatattctctatgaactgagagaacaggctaagcgagaggatcttcaagtcttttccgcttacgatgcaaagcgtgcttgtagccgattgcttgcagaggaagccttgacacattaaagcgttgccttctgctagcagcagtttcatgtaagaagcaacttcgttcgcaagctaatgttttttttgggttggatagccggccgcgcacggctgacggagcgccgacatcgaactggcaacctgtgcatcgacttgctgctcgtccactaggccgaggacctttgcgcctaggtgctatttttgacgcatgcgcggcacgaagcgatgtgtgattttggtaattttcggacggaaggaatatggccggtcatcccaatgtccccgagcgagcccatgttggtgtcgagctgagattgacgtcatgggctggttggctcaagcgcgaccaccgcgccacatgttcgaagctggcgagcgcagtagcggcgctcgccgactaatactatgaggtcgtcaacttggtacgccagaagtccagaacacgatgagccaattccacaacttcaatctttccgcttagggtcaggccgttgtcctcaacaagcagcacgtagacctcctgctcgaagtaccctggctcgacgtatccgtcctccgcatagctctcgtccacaacatcctcaataaggtcgtggcgtgcattggttaattcaaaatgttttaggccatctgcaatgtgggcgcagattttaagtacagggtttcctgaccgctcactgaccaaccctgcccagtcggcgatatggtgagctgtgacaaagaagttgaaagcaatccaagcgtcctgtggattggcctctagtttcgcgaggtcattttctgccttgagcaaaagatcacgagcactccgaagtgccaagaaacctgtccgagaaggggtgtagtgagcgatgacgtttggcttgaccattcgttttcctattatggtgtgcgagtcctttgtggggtagtcgtactttttgagcaaaatctggcactagccaaccggagagccgactgcagcaaggctttgtggctacactcactttgtaacggcaggcgttgtggcaagcccttgatccacattgatttttggagccaaccgccagatttcgcaccaaaagtacgatcaccccccaacgagctgcgcgcctctttcttttgtccatccgcagttcgtgatctcgagcgctttttcctcaatccgcagtggggctcccccgtcaatgagaatatcggcggcggcacactaacctatcgcgctgtgcaagaccctcgcgcaccggagcggacattctggcgcttcactatctacggtatcgtcatgggacatgcgcctgggcgaccgggcgtgcgggcggatgcgatctatggcgtctcaaatcctccgcgagaatgagagtgctggcgccggggcaggtgcaagccaatcgcggccaaaattcagccgactagccgatcaggggcgcaatggaaacaatcgacggtatcgatttgagcggcttcacgcctgcggtcaccatcaagagtctccacaacacccgttgcacccacgtacccaccgcagcgggcgtctatgtcgttgtccgcacagaatctaccgccccgaagtttctctcagagagccgggctggatggttcaaggggcagcatcccagctatccggaacacattgttcgagataattgggtagaaggcgccacggtgatctacgtcgggaaggcctgcgggcgcaacggtcttcgccagcgagtgcgccaactggtggagttcgcctacggcaaagcgattgggcatcgcggtggtcgactgctttggcacctcgcggagtgggaggatttgcaaatgcactggatggagtgcccaagcttggcagcagatggcctcgaaaccgagttgatcggacagttccgacagatgtatggcgatcgcccgtttgcgaacatgacgaagtgatagtcagacatccgctacggttccgtgtgccttctaattaggaactgttggcggcgctatgctgttgaaatggcacaaggcgacctggattgataccgcgaacggcgtgatctcaaagtcacggtagagccagccgcggatcgatcagcgcggcggcgaaaggcgcagctgcgcttcgtcgtaggccttatgcgcctccggccaggatagagggttggccgggattcccaaaatatctgaagcttcagatatttcgaatcccggccggccctcgcggtcgcgcgggaagaggtcgcggccatctcggcgcagttggccgaggcgcgccagtcgcacggcgccgtgcaggcggacctggccgcggagcggcaggcgcacgcggcgacgcaggcccggctcgaagcgggccgcacggaactggaggcgggccgacgtcagctggagacgttgcgcacccaattctcgacggagttggagcccgcgagcaggtgaccctcgcgcaggaacgggccgaggccagcgagcggcggagcttgcgcgagctggacgccgagcgcaccgcccgccagcagagcgagcgcgcggccgaagcgttgcgcggcgaactggcggcggtgcgcagcgaggcccgcgacgtggccgtggcgcaggccgaaatccgcgcgcggctcgaagcccaggccgcggcgctagccgatcggctcgccaccgccgagcaggcgcagcgcaaagcggcgcacgacctggacgcgctgcaggcggagctgggcgcggcgcagcgccgggccgaacgggccgaggccgaagcggcgctggcgcgccagctgctggcagaattgcgggtggcgccagccgggcggggggaaggtggtggcgggcggcggcgcaaggccggcgacccggcgccgaccgagcaggcggcgccaggcgaaaaacagaacgaacagcaggacgacaagcagggcgcgccagccgcagccttgaatccggaagacggcagcgacagcagtgacgacagcaatgacagcaaaaactgagcgggcggcggcgatccgctggatccgggcggagatggccgactacgggctgaccatggaggagctggcagcggcggggtgcttcgatccgccgcctcctccgccaccgccgccacccgcaccagcgccggtggtctgctaccgcaacgccgcggggcagagttgggacgggcagggcgacatgcccgactggctcaggcgggcggtcaatgcggggcaggccgtggagtttttccgggtcgggtagcgccgccgctatctcggctcggccgcggatcgatctgcggccgatgccccttgtgatagcggattccccgtatcttggcacgccccctacaacccgcgatcgatcgcggctgtcgggctattggcggcctaccgtgccgaccctcagccgacaacactggaacgcgtgcttcacgtggccgtccagcacgatacgggcatggccgggtgctacgggccggggcgactgcgcagcgtaagcgagtcgccagcaccgtctgtaccgttcagtagagtggcgccaaagtagttcccaccaaatagtgatgggaactactttgtcacagtcacaggaagaaccagtcgccggcagtcgcaaaggccggccgaaccacagcgaggaattcaagcggcggttggcagccgctgcgtgtgagccgggtgtctcggtatcgaaattggcgcgcgagcacggcatcaacgcgaacatgctgttcacctggcgccgacgctatcgaatggagcagcgccaggaagccgcggtgttgttgccggtgaccgttgaacacccaagctcgccacccggtccgatgccaatgagtccggccgctgcggtttgcgagccgacgccgccgcacggcgccattgagatccgtttgggccgagcggtgattcgcattgaaggggcagtcgacgcgaccacgttgcgtaccgtactggaccgtttgacgccatgatcgggttgccggcgggaacacgcatctggatcgctgcaggcgtgaccgacatgcgctgcggattcaacgggctcgccgcgaaggtggaggcgactctgcaggagagcccgttctccggccatgtcttcgtcttccgcggcaggcgcggcaacgtcatcaaggtgttgtggtcaacgggcgatgggctttgcttgctctcgaagcgcctggagcgcggacgtttcgtctggccgcaggccgacagcggcaagatccacctgacgcaagcgcagttgtcgatgctgctggaggggatcaactggaagcagcccgagcgcacctggccgccactgtcggtgttgtaaaccttgcggcatgtgcgtaaactgccgcgcatgccaatcgaccccagcgatctccccgacgacattgaggccctgaaggccttggtgttggcacagcgggaatcgatcgcactcatggaacgggccttggcggtccgctccatggagatcgagcagctaaatctgcagatctcaaagctgaggcggatgcagtttggccagaagtccgagaagctggatcgacagattgaacagctcgagacccgactggaagatctgctggccgaggaaggtgcggccgaaaccgaagccgatccgcaggctacccctcctgtccggaagaaagcggtacgcaagccgttgccggagcacctggagcgggaggagcgcattctcgagcccgagaccgaagcctgtccagagtgcggcggtaagctcaagccgctgggcgaggacatctcggagcaactcgatattatcagcagttcattcagggtgattcggcaagtgcggcgcaagaaggcctgcgcctgttgtgattgcatcgtgcaggctgcagcgccaagccggccaattgagcgtggcattgccacggcggggctgcacgctcacatactggttgccaaatatgctgatcatcaaccgctgtaccgtcaagccgcgatctatgcccggcagggcgtggagctggaccgcacgaccatggctcgcggtgtcggcgcttgcggtgcgctggtacgccccctagtcgaggctttgcaccgatacgtgatgatgcccggcaaggtgcatgcggacgacacaccgctgccggtacttgcgccaggtaagggacagaccaagacgggaagactatgggcttacgtgcgggacgatcgcgcatcgggttcagatgctgcacctgcagtctggttcgcctacacaccaaatcgccagggccaacatccccaagcgcatctggccggcttccgcggcatcctgcaggcagacgcgtatgcgggcttcaacgctgtttttaccgatggcagtgtgcgcgaagcagcttgtatggcccacgcgcgccgtaaggtgcacgatctgcatgtccgcaaggcaacgccgaccaccacggaggcgttacgccggatcggcgagctctatgccatcgaagcggaaatccggggtaagccacctgccgtgcgtcaacaggtgcggcagcaaagatcccggcccctactggacagcctcgaagtgtggttgcgagagcggctattgacgctctcaacgcagtcggaaacgaccaaagccatcaactacatgctgaaccagtggcaagcgctaatctactactgtgatgatggtctggcagagatagacaacaacatcgcggagaatgcgctgcgcggtgtcgcgttgggtcggaagaattttttattcgccggcgctgacagtggcggcgagcgcgcggccgcaatgtactcgctcatcgggtcctgcaaactcaacggcatcgatcccgaggcctatctgcgtcacgtcttggcccgcatcgccgatcatcccgtcaatcggatcgacggacttctgccgtggaacgtcgccgctcaactggcgttgcaagcctaaagcagcaccattcctgtctcgtcgtcaaccacggtgctggcgatccgcttactgcgcagcgatccctgccaccggcaatgctacggacgctgatgcgcctgggcctgacctcgaccacctacgccttgccaagccgcgatctagtggattgggagtgcgtcgaggactatcgcgcccatcgtgaggcgcaagaaaacgcccgaaaagacgcggaacgtgacaggctgcgggcagcggtcacggcggaactgcgatggctgtcgggcgagggggacgagcctggctggccggagctgccggacccgagatccccgaaggtgcgtgccgggatccccttgggcgtgccgcgacgacagcgtgcaaagccacccgcgccacgcgagtacgcgctggactcgagcgcggcggcgcattggctgtcgctcgcgaaagacctttggtatcgggacgcgcccgagcggttgcgcggcctggtgcttcactgttgggcgtggacggcaagcgcgaacggcgtcggatgcaaaaaagatgaagagcctggggagcgcgcgcatcaatggaacgaagcgtatttcgccgcagcgaccgccgcggccgccacgctgggtgatgccggcctcagcgagatggtcctccagcgcgtcgcccagttgccgcaagatcgcttcctcgacgccaccaccgcggtgctgcatgagctcgacagactctggatgaacaacgggctcgtgtcgggtcccttagtgttattggtatgggagaccctggcgtcgcgcatcagggaattctgggcgtggaagcgactcacgtctgagtgctcgaccagcgcggaaatccatctcacaggcgcactcgctgcgctgtttatgggggagtacgagatcgggaagggacctcgctgctatgtccgtccgcccggggctgagggagcggacgccctgttgccgatgctcacgcgcctggccgtggaggccgcgccgtccaccttcgtcgccctcgcgatacttggcctgcttgaggtgcagccgcaagtgcatcgactgacgttccttgcgggagtggtcagtgcctggtggcgggcgcagggtgcaaacacggaattctggaacgactacggcatagggccccgggtatgcgcctgggtcgaaaaggccatcctaagcgctccggtaccccaggaggttctggatagcgcggaactgacgtccgtcgtggatacgctggtccaaaccggcacgccactggcgcggatcctcgacgagaagcttgcgcgaccgcgctgacgcggtcctgtggatcaagtcccacatggcccacctcggattgacctacgagcagcacctcctcgcggccggctgtttcgcgtcgcccggcgtggccggcggcaaaaaggtgtcggtggagcgcctgtcagaggagttccgggattcaccgccaaaccgcggcgaagcatagcgagcgcctggcgttattcctgcggggtagaaagggtgttaatggcgaaatcggcgagcaggcaaaggcaatgcagtatgtggatgctgcgtaatcgtggcattgttggaatggaagaggctgcgtagctggtcggtgactttggaggataatggcctttttcgctcctagtttttgactagcatggacgcgcctaaagacgagccagtactgccgcagcccataggcacaagccccgaccagtggaaagctctaggaagttccattgttgagatcggggttgccattggatccgccttcaggcagatgcaggagtggtgggtagccaatgctccggttataggagctgcaattcagttcgcgattaaggagcttcctcctgcgtaccgtcgagcaatggttgaattggctaagcacggttggtacattgatatgcagcgcatggggctggggcatccccctcggctagccgaagctcttcgcaagaacgagggtgccgaggaggcgaaggaagagctaagactgcatttttcagtgcatttggatgagattgaaactgaggtgtgcgagctgctcccacaccgctcgcatatcctggcgcaggcgttcaatgcccacagggccgggcagtacgcgctttcaataccagtgttcctgtcgcaagccgatggaatctgttttgaaaaggtgaatgcctactacttcgtttccgacaagactccggagggtcggaagattggtcgcccggagactgctatccatgccgaatccctcgaccatgatttttggacgcgtattgtgctggctccgctaggcgaattcggtgagctcaatgtaagtggcaagaagcggcctccagacttccaagggctaaaccgccacacagtgatgcatggtcagtcgctcgactatggaactgagatcaacagcctcaaggcgatctcacttctgaactatgtgtcgcacgtcttggcccgcaagagctttccgcagcgtttgcaggaaggtgacagcccgccagtcgccggccgcctcgtgcgaaatccacgtcgctaacccggagctgctcgtcaagttcgagccgggccagaggtttttacgtcgacttcacaccccgcataaccggggtagtcccgcgtagcgcgcattcctcccgggaaagccgagggttcgcttgccgagcgagagttatagaaggaagtcgaccgggacagccccgtgaaggcaaagctgaggcgacgcgcgcccccgacgcacgcacgccgcaacgtcgctacgtcgctggatgtgtaaccgtcttaccgttacatcacgcgggccctggtgaaggcactgggcctgccggcaggaaccattgaattcgagctgcgcgctgccgtcggcgagatcgttacggtgaattgcacttacgttcaaaccaatgacactactttcgggtttaagccggcgccgcgcccatgcggccatccagttccatcatcagattctaaaactgagccgtgccggtcgccttgaacagcaggtcgcgtgtgcgtctcggtatcccgtccatcggtaccgacttttttgttctgggcgtggcggtacgtgttcgcgaattgccaataaggtggagctcgccgcagcgcagcgccgggccgagcggggcgaagcggaagcggcccaagtggacgactttagcgagacgtcagtttcccaaaaaagctgcgaatcctgcgcgcaggtagatgctgcttcgcgcgccgtcgtccgcgatgccgcgcgccaagcctcgcatctgagcgagtagcagctccctcaacgcccatagatcggctgaaccaggagcggcattggcaacgtcttcgatgagttgtcgcacgtaattcttggtttcatcatctacttcggaactggtgaggcaccttagcagacagatcacaaacagagtctcattttgaaagtgtcgaactacccttgagcctaacacgagcgacttggggaacccttcaggatttatgtacgcgggcgtccttgttcttgcctgttgcactgcgctcgcacatgcgaagagcaactggataggcgtggcgccggcgaccagcaatggcgagtcattgccaaagacgggcgccgaccgccccttttccaggcatacccactcagagtggaccaggcctgtctccgtttgccccaaaagtgcgcctcgctcatccgtcccacctgcctcctcgtcgtcaaactccaaggggagctgagaaatgctgaaggactctcggcaccacggacaagcgcgctcgccggaatccggaagtgcaaaccgatatagccattcaacacgaaacgccctttcatgatggtcggaggcgatgcctcgaattgcactgtccatctcactttcattcgcggggaggacgagcagtggcatgagtgtgatgagcctgggcgccacgaagaggtcgttcgatccccgtatggctttgacatatgcctgcaatctttcggagccgtaggcgacgtcatcgattatcaatatcgattcagactgcgagattgcttccgcgagagtgcgatctaggtcgaccgcaagattgatgcgcaatgattcatgcgactctacgcgaatctgtagttcgcgcttgaggaatcgggctattgcagccgcgcctcgatgaacaggggtgatgatgaggtcgggaactgggtccataccccgaatcttgccgaggagctgttcgcaaaatgctgggatttccagcagtttctccacgttgatgctaaatgcacgatgcttcccgcttccccagctcgtatcattgacgtgcgtgcgcaaaacgccatcgaaatggccgtaagcttcgatgaaggtgcgctgcgctctgaagaggagggggggcaatgcccgggtgtcgacatttctcgccgcgaggaagtatcgagcgcgatcaatgcgaaatacgggactgttgccttgctgacatgccacgcaatgttcagatgacgtcgtgtgccagtagtcatcgatttgtagtgcgcaaaatgcatgcgacgctgggtctggcgtggttgcgtagagcactgacgtaccaacgggcacatcaagtgaccccgcgactctccgcaatgtcttagtgagtgtgccagtggacgacacgctgacaatgaagtgaatccgggagtttaccgcaatgcgtggctgcagccattgacgaagatctgccgatctgtctgggttctcaggatatgcgcgtacgcaatcatatgtcatcgccaatttggggaagacatgactcaagcgaagcgcaagagtaagcgtactgggattgtcgaccagcacaactaagccacaagtctgattcggatcagcaccgatggcgtgttgttcacagatgtctcgggcgacccaatatacgagtttatccagatcgtcagtacttgctaagcactcggcaagtcggaagaaatgagatgtgtgcgcgcctgatggcaactcaaaatggcctccgtccaccgccagtaccgcacgatttcggtgaacatttacgatgtcagagagttcctggctgcggatatcagtaagttcctccgccatcatcacagctagggcgggaccaccgtccccgtcggcggtcaccatcaagggtgtcttgagcatgtcttcaggagacgcatccgagacgatctcgttcagctgaggcaagcggggcaggatcgccaagcgtccacctttcaagcgcttcgcaacgtctgccaaagcgtatcttagacgaccggacgctgtctctaccgtctcggcaataaccgcttgattgaaaatcgcagtggctgtcaacaaacttcggaataggggcaaggcaacacgagcgacgtatgctccagcctcacttgcataatcatgcgtagtggaagagagagcagcgtcgatatcggcgatggactctatgtcgccgcgaataaacgcccagcgggtatctgtcattgccgccttagagagccagtacgcgctgatcgacgtctgtgaagagcacaggcacaaacaggtctacgcatgttcctgccgcgaactgctgaggaagcctggagagaaccgcgccatccattgtcggcatcttgtcttctccgagggaaaagtctttgataagccgatggccagcggaagtaacttgcaggcgtgtccgaagacgaaatgccgcgtccacgaccttaagcaagcccatccctttttcgacggaactgacgctcttgcgggtctgcttcagctgaaacgccctgcgcaaccgatcttcggggtgttcctcaacggactcagcagggagggtgttctgaatgccttctcccatgtccataacggatatgcaagccagcagtcggtctttgtccgtcttttccatttccgcaacgcgcagcagaaattcgcgcatctccgcagaaatatctcgcctgtctagctgggcggcgttgaagacgatcttggtaatcgagatgcctcgtgtgctatgccttgctacgcgagcgtcgtgtggccgtccgtgctgtagcgtgttcgcaaaggtctcatagatgaaatccgtcagtgttggaagagtgctttggctagcaatgcgccccaagcccatccctgacaaaattctgtgcagaccagaagcgaactgcgagggcaatggtatctcggtggcgttgacatccgagtgggtgtcaaatacgcgaggaatcgagcgtttgggatcaaacgccaggatgccaacgcggtctccgagtccaattacgccacgctttgcatcgtagcagcggccagcaaaccgtcgaagctccgtcgcaccactctcagggccgtcacggaacgccgcggtagcacatgcccgtaagagcgcatagccgaacatcgtggacagaagcgttccactgaaatcgttgttgtcccgagggaaagcgaattcgcaatggatgtgtaacgaagagcatctcttgatggcagcactaaggtacgccagggcaagcccctctgcgccagcttcgaactccgcggatttgccaataacaaggctaagggaggcttcgcccgcgtctggccattgcaaaacatcttctgcggcaatgcgatcaagcagcgtgacttgggtaggcatgcagttgttccgaggagttcaaagccaacaaatccgtgggttcgggatcttagcgcactgtagcccgttcagcgagcagtggaaggtcgggcagacaaactcgggacgtacgatccttttgaatcaaagacttgcagcgaacgcctagttttagctttcccatgaaaaaggtcatcaaagcacattttaggtgtcgatgggaattgttgacctgctgttctccgaccgccaacaagctctacagcctggtgcgcaagggcagcgtggcacgccagctgagccgctgcaagcgtactcgcaggagctgtgcgggcgcacgcgcgtcaccatcgagcatccggacctcccggacgctttgaaacaggtggccgcccacgcccatcaaggcaatctgacagacggccaccgaagccgccatcggcgagctggccacgctgcgtgccgaggccgccatgtggtcagtgccgccaagggccggcgaacgaattgctgataagtctttgaatcttcggagaatgatgtgggcttaacttgtgatggcggtctctcaggtgactcccactcgctccacaagctgcttgcccccccacgattgtgctatctggcctggcccgctctgggtgagcgctggcgtggctggcggcttcaaaaccagattcgctttgaatgctgtcaaaatacggacaacgaaacgccgtggagcagcaatgcagggtttaccggtctcgccctcgctcattcctctcgacaccctgagggaacagatcgcacgggccgttgccacggccaaggcctacgacgttcccgatgtctgtgtcggcctgaggattcagcagtcggtggacgaggccgatgcgcaggaggctttcggcagcaaacggctgtacgtccgacgcaggatcatctcctggagcgaggcggaccttttagacttggcaacgcgggtgctacgcgattacccctcggaggaacttgcggacatcgtgagcgagatgaccgtccatgcagaacagcgcgtaagtgcattggtccggcgtgacgttctcaaggctctcaatcccttggcctccctgttcggcgacctaccgctgattgatggactcagagtggtgttcggtgcctcggtcatccaggacgatccgacagggctgactggtctgcttggccttaccagcctgcatgggcagattgtccagcactgcttacgcaacgatgactggtcccatgaagagctgctgattcaatgcggcgcgatgacgtgcagccagacccgcttcttttcgttgctgaacaagcttttgcatcccatgtcacgccgtgacggcgagcaggcgacactagccaccgcgatcgacacggcactcaggcgggacggcttcgcggttaggaagaccagcgtggagtcggggtacgccgtctatggcgtggtccgcatgcaggcaggtgtcgtcggagcaatgaagaacctgatcttcgcatcaatcggtgagaagccagaattggtctttcgcgacgcagtcaataacgacgtcgagatcatcaagcatgccgacaaagtactggtctttgaccgccctttacccaattccggactgctgctctggaaggacttgcgcgactggtatgccgaacttcagggtattagcgacgtggccagtgcgaaagagaatcttttccggcggctgcgccaggctgtgctcggtgcccgttcggcgggtgagtttgcggtatttcaaggctactacgagcgctacggtggtccgcttggagagcggttgcccgcgcttgtcccgcaggtctatctgcactacgacccctacacccgtcgccaacgcggcgacgaacagtttttagcgcgccagcgtatggattttctgctgatgctggatcacggcgtgcgcatcgtgatcgagatcgatggccgccaccactacgcagtaccggatcctctagcgccggatcggttcatcgcaaactcccagcgctatgccgagatggtggcggaagatcgtcggctgcggcttatggggtacgaggtctaccgcttcggcggttacgaattcttggacgttgacctggaacagcgcagggttggtccacacgctcaaaaatgcgtcgcggacttctttgacaggcttttggcccggcattgtgttaggtgattagcattgtgtgaggcgacataccatttgaagagaccaactacacaagcgctggcaatggcagatccccgcatgattttttagttcagtgagcgagagaacgggcgacgtgctaggaccgggtatgcgatattgccgacggtgtgacgaggtaccccgcggacggtcctgctcggagtctaacagccaggcaagaggcggggaaccgtttttcggccggcctgccggccgcactcgggtggcgaatgtcgaagcagggtcccgattgtgaaggatcctgcgcggtaaacgtggcgacaagggacgcccggtttgccgccaaggctgagcactctttgacgaagaccattacgtctcgtcgtcgaggccttcgcgatccttcgaaagctccctcagcttcttccccatatcggtggctatcatctgataggtcatattcgcattcaggcggaccaactcgtcgacgctaagcatgtcgattcgaccattgggcagcagtcggacgttcaacataccctccatgccattgggatgcatcttgccggattgaagatgttcgtggacgagattgattcgttcctcgaactcttccctcgtcgtgggccgctgcattgtcgtgagtttgggcaacatgatctattacgccttatgaagcaccgctcggacctgtccgttgatcctcaacatccattgcatgcgccaccccgcaggtagggttaacgcgtcgcgacggatggcgagtatggaaacctcatgacgacggctgactccccgagttcggacagtgctaccgtctctccaatggtacctgaccatagcggaaggtggagcacgcaatagatccacgaattgcgggttcgctatggcaggtgtgagagctccaaagtgtgccagtccaggtttaacacgaccgcagactgtaagctggtcgcttggcccaggtcgcggaagctccgtcggtttaaaggtgcctaactgcccggagttaggctcccgctgtcccggcgggagcaggtgcgatgtaaggtctaccttaatcacctgccgccttcgctccagatagcactggacatccaagaaaacgagatcgtcgcttgagggtaggaaccttgtttcgttgcctgactccattgcgtcgatcagccctgcgacgagccgccttccgtccggtggctcgaccaacgactccgggttgtaaatgcgcagagcagcttcaatcttggcgagctgctcaatcgacgctggcgcgaagagtgcaacattgagtgcaaaccgaactcttgctgcccatcggtccgggacgacgcctgcccactctccatgccttctagcagccaggctgtcgagttgttgcacatcggataaggcgtatggtccgcacgagtcctgaaggatcgacgcagctcgctgtagagccgcatcgttcaagatgcccaagcgcgtaagctccctccaagatgcagttaggctgggaggcacgtggtctgcatgcaggcggctcttcgccgggtcttctgggcttggatgcgcgattggcttggcgcgtagaactttgaccgcatctgccgctgaagcaacgcccttattgctcgcgcggtcggctattcgcaggagcgtcgcaaaccgtcctgcatgtgtgcatgcccgcaccacttcgttgacatcgacgaagcgcacgacacgttcccaaaggcttgctggagtctcgcgggacaagatgtccagcgcccctgcagcaacgtcagcgcggctgccactatccatcgaaaacgccagccgggccagcctcgccatcaaagcatcgtcagagcgcagcaaccagagcaccattgctgcagctgtatcgcgccgctcccagctcgggtgatcaagtgcccaaagcaagagctcaaggagggcatcggatgcactgacgggctttgttgctccgatgtatgagaaggcttcggacggagcgctccccaccatctcgcgaacatgctcagtcgcgaccgacagtagctgggtccgctgacttgcatctagcttggggccaatcaaattgatgaggtgatacgcggctgtccagcgctgcacgtgctgctcattgagagccagtgggccgtacagtcgcgctagctcatcagccgactgcacgttctcccggatgatcgtgtcagctaggctgctgcccgagtggcccttctcccatatcgaccacccgccgccttgtaatgccctgagagcgaagacagctcgctcaacggcagctgatgtgtttcggcgcttgatgtgtttcctcgcttcctccagcgctaggtcagcatccctgacggaagttctgcttccaaaggtgccaggcatgaacagccggtcctcgccgccgtcctcctcatcagtctcggcagcttctgcggcatttgggacgtcgggattcggcgggccgcctgcaaccacttcactgcgaacaccgaatctcgcagttaactggtcaaactgattcgggctgaaagactctcgaaactgctgaagcatctccgagaacgcctcgcaaaggaaggccggcagcgcccccgtcaagctatgcatgagcatccaagcgcgctcggcattcatcgtgtgcgcgattctgccaattcgcttgactgcccaagccaggtccgccgcgctgtgtgatatttcctggatgatggtcgcgtaggctggcccccaatctctcaggtaccgctcgtctccgtgctggtagacctctaggagcgcccagcgcactctccagtccgcgtggattccagcgtgttcaaggagctgcatcaatgccgcttgttcctccagcgcgccgcctgggtaacgcatgccaacgagaggagctacgcggtcaagaccaccgtccgatgcttgttcgcacatctccttgatgctgccatgagcctgatgctgaaagtagcgaacggcgtctgcatacatgccacgtcgactcagttccccgatgaacgtccccttgtctgagcggacgtatcgctgaaacgtcatctctccgctggcgtgttccaggtacgcggcaatctgggctaaagccgcgggggcaatctcagcgtctgctgggagtgcttcaagcactctcgacattacggcgaattggtcctccttgtaccaactcgggcccatcgaagcggcgaggacggagtgataggtacggagagcttcctctgcggactccatccgagcgaacagtgggaccatcgagagcagttcaggtacgagctcgtgcctgttctgcacgttgtctctgacgtagtcccgccaacgcagcaagagcgcgaacgctttatcggcggtatcgcctgaaatgcctgcattgacgagcgttccgatcaccgctgccaaggcgcgacgaaagccttcattgtacaggccgagttgtccgtcaaatgactcctgaataacctcgagaagctcggcagcctcgtcgggaagacagtccagatagaggtctgcaaggtggccgtataggagcggcagaatgttctcagggatgaagtaggccccggcccaaagcatgcgcgacgcgagttcgagcctgaagaatgggagaacctcatcgttgaggtacttctttgcagaggcgagggcggccgggtcactggttgcgcgcgcatggcgaacttttgcgtctgcccatgcaacggcttgagccagggtctctagccattcctcccagttgccgtgctccagcgcctcgggcatgggtctggtctggttacggcccagaaaattggcggctcgaagacgcgcgtaggcctccacgaacgccttctcgtcggcgagagagcgattctctgtaaacagaggaagggtagcggcatcccacaccactccgttggagtaggcctcaacgaggccggcgtcggctcctgcttcgatcagcaagtcaacgacgccaaatgccttctcgtcaacggttagcgagtcgtcaatcttgctgccaatgtccgcgagcagcatctccaccttgtccctcggaaggcgggtgccgtagttgcgagcgtggatgcgagcataggcaagcaccgagattagcgagagcgcttgatccttgttgggcgtatctgtagggataggaagctgagagagcggcttgtaggaatgagccacgcagaggatgtttccgagcatgttgccgataacgtcgctcagcagcttctgcccgtgctcctgcgagatattgttttggggtgctttgacgagccgaatgacgtatttcaggaagtcgaatgtggacggatcggctcctgcatagctagccaagccatagccttggagcttgactgccgctgcattgagatattcgccaacctttacgccgtcgcgtgtaaggatcggtagaagcaggctgtcgaccttttgaaggatctcgagggcttcgttctgatgccccgcctcgatgaggcttcttgctatggcgaaggcgtcgctcgggtctacgatgaggtgcccatagcgaaggatgtgccgcatagcctgttctgtcttgccaagcgcgatcagggcctcagcggcaaggccagcagactgagcaaagagcgtgtcgtaacggaatttaagccgttgcgagagaagcaggaggcgaaagatgtcagtcgcggtgcctagacgagtggcagcctcaagcgaatcctcgatgtcccccaggagaacgtcaggctcagccccgagaagtacggattggtcgacccattgctgctggcactcacctatcgctgccagctgcttttgagcgtcggcacggaggccatggaacacacggttgagcgtcccgtagtcgccgctaccaggctgaaggcagaactcagcaagtcgcccttgaacccattcgctctgcgtcgatgtcttgtgaaccacgaagtcagagaacgacgagtgatagacctcggtcgtgtccggtgccgacagcaagtggcggatgcgagtgatggtcggaacgaacgctgcagactctgacggggtcagcatggccatcaggtcggtcgttgggatcccccagcgaaggcgcgtgacgatgctaagcaggttgatcgcatccgtttccgcaaggagctgtgcccagatgctctcgtagtagtcttcaatagatccactaaacggcggcagtgactcgaggtcgccctcgctggcgccaccgttaacgaggtcgacaaggtagcgcaggtacagcggatggccctttgcgcgctcgcaaagagcagagaccagtgtagaagtaaccttctctgcatcaagggacgacgcgcaaagccggtactgaatgtcctcgtccaaggtcggcagcgtcaagcgctcagccccatagaggagagggctgagcttgccggcgatggcgtccagacctgctcccactaccacaacttgtactcctggcggaatgcttggaggcaagagtccgacgaagcgctgcaaggcgtcaccgccgacggcagcagcctcgttgatcccgtcgatgaacaacactcctactttgccgtcactcgagcaacgttgcgccaaggcctgaaaggcctgatgcgtcgtctgaatgagctgtgcatatgtgagctgcatcagccgagctggcttgccggtagcccgcgtcgatagcaacgaggtcaaccagtcgacgaagacttccggttgcacctggagagccggagtagagccgcgactgcactcggaaaaggcatagacacccaggacttctacattggccgattccggcttgaagcctcggcaatatgtcgacttgccgatgccgtgagcaccatcaaggaacaggtatcctccgccggccttgaccactgtcgactcaaacaactcatcaaacgcgggccgcgatgcgaacggtgaggcgtcgccttgagacgcttcgccctccggaagaagcccgtttgcggccaggaactcccgaagcgcctccgtgctcacggcgccgagggcgttgtcgacgctgacgcgcagcatcccctggcagccgtctgtagtcatgagcgcagcgccggacatcccgcggtagtcagtcaacaccgtctccgggctaaccgagaggtcgagatctacaccgttggccagctcgttcagggcctgctgcaccgctccctgcaggacctggccaatctgcagcttggagaccggatagccaaaggagagccatcgctcgcctggccgcggagcgccgacgttgagtgctactggcgcgaaggcggagggctcttgaagcctcaatatgcaaacgtcaaggtcggtatcaaacgcatccaagaccgcctgctgcttcgacgcggactgcccgactccaaagctgacctcaaggctgactccttgatcggctgcctcgccgagacagtgataggccgtcaggacatggtcagcagatatcagccatcctgtaccggcttcgccagcacctagaacctggcacgtcgcgagcttcacttcctcttcagtcattgttcttctccctagacgtggatccagccgtcttgaacgacgtccacgttgaacttcgccccggaccttgacacgtgcgccctgaggcgagtggatgcgggggtctcgtagttgaagtagatctttcgctcgaaggtcgcgggcctgtcgacgatctcggccaacacttcatagtctgggtgatggtggattgatccgttggttgaaaccaagaaaatgggagcgtcaatgagcgacagaagatccacgctcgtgttgtggatgctgccgtgatgagacaccttgatggcatcgaacagctgcggacggccatctccatggagcctcttgagctcaacgacaacgtcctcggcccaagcatcgcccagaaacagtagcctcttgccttcactctcgatgagggtggcaatcgaactgccattggtaggggagatgtcgggcacgtacacctcattgagcctcttggtgctcccagctgaaatggtcttgaccatcgccggtgccggctgccgggtgtatgcgcaaaccatttcgtaggcgtcctcaaccacagggtcgaccgctgctccacctttgtaggagagcctgcgcatctccaggatccaccaagtgcgcaattcctccagtcgggccactgttgggcctatcaagcggacctgaacgccattcggcaaggtgtacggggggcgcccgctcgtcatgttcgtggtgccatcgctcgcgttccataggtagccgtattgcttgaggcgcttcgccaaggagcttccctgctttgcgctgatgggatttgcagtcggcccagatgccggtggcagaagaaatcctcgcctccggatcgcctcgagtacctggcagtcggacgcgctgtctggcgggcctggtggggacggaagcgatcgaaggctgttgtgccagacctctttgacctcaacaatgcttcgcgctcctggagcgccgttcgaggagatgaactcgagaagccctccaatgtggtctccatcaatatgggtgcagacgagcagatccagttggccgcccgcacgtgccaactgcctcaaatcgggtgcgatgtggtcgttgaaggtgctcgcaaagcccgcgtcgatgaggacgtgggagcctgaagcatcgacaagaaaggcatcgccgtttctagccgggtacattttcagtctgagcatgcacgctattcgctatctcctgaacccagccttcttcgcattggaagcctaccgtacgcgaccttgcgaaatctgcgttcgacaaatcagtccgtggcaaataaaagtcggcccgcgcttggcgggtcaactcggattcttagaagggatatttttctttgagatcagaatagtttgcagcgatccagtttattactttggaacgtccttggatgtcggaaggcagcttttcgtggatcatccattcacagatttgacgcgtgcggatgctcaaatcggcctgatctttgcctttgagagaattgagcaacgtcaagacttcgtagccctctttacgactgaacctatctgcgtcctctttggtcttcttgggatcgtccccagtcacggtggtccagctgtagtcttcgtagttgagatcgctttttttgatttccggcacttttctcatcctccaggtgaagtcgaatatcggtcaggggggatcacgatacatatttcaagggctactaaaaaaaataatatgcctttcgtgggacttgccggattctcaactgagcacgcaaggtaagaggggaacccggtcatcaatattctcctgggatgctgcgtcacgtcagcagtttaacgggactcgctggattttcttgactcgactcgaaggtgtcctgttttaagcgacagtgatggtttggacgcctgccgtcgccagaaggccatacagcggtgcgatgttgactcgtgcaccacgctgtggcgtataggtaaagatcacccgttgcttcgcgcgtgtgaacgccacgaagaaacctgccgtcgcgtcgacggtgtcctgtacaaagctccaccatgccgagtcgtcgaggccgatgaagatcacggtgtggtactccagccccttgctcttgtgcagcgtcatgagcggtagggcttttgttccttcgtaggcatcgagtgtcgcagcccagtcagttgcctggacggcgctcgactgcagatgcaaggccagactattctcgacttccgcgagccaccccccttgtccatagggcgtatgggccgcgatgagggcatcacggcccaggaaagcctccacctcctggatgacagcgcgggccatcgcctcagtctccggcggttggggatgctgctggataaaccgacgcgcaaaggcgtctagatcctgagcaaggacgcgacgtgcacggtcgtcggtaggcgcgatgccccgcaagtttgctaatgcgtgctgggcttcgatccaggtcaatccgcctcgaggggcgcaggccaagcgaaggattaacagcactagttccgacaggggttcggtgagcagctcttgcagcatctgggcgccaacataggcggcttcgttgcgcagggggatacccgcggtcgcaaaggcgggggctaggacccgggcatagtcttccgccttctgccgtaccaacagcacgaagtcgttgggctgtaattgatgctcgcgcatctgcgacgcgacgtaccgggcaagagcctgggcttcagtgttcacgctggagaagtcccagatggcacagcaagcatcggaaatactggcggcggcttttgactgtgggtgcgcggcagacgtgtcgagcgcttgcgccagtacgtgttggatgcgcacgagctcgggcgaggagcggtagttgctgagcagagggatgcgttgcgcgccgaaagtctgttcgaatgcgccgaaaggatcgtccatcgctagtgcgaagcgcatgatctgctgcttgttgtcacccacagctgtcaggatcgttggcatgcccaggaagattgtttggactaggtcgaactgggcctcagtcgtgtcctggaactcatccatgaacacatgagagtaggtcagcgccaaggcgttacgtacggacgcattaacgcggaccagcagttccgccagtcggctgagcatggggaaggtgaggtggctgcgcgtggcgcctcgaagctgttcgtcccagaaccgctgtccagcccagaggcctgcatttcccgacgtccagccggcctctggtaagcgctcagcgagcacatgacggcgctcgaagtaattgaccgagagtccttgcacggccgcttgcccgaaggggttgtccagagcaagggacgcacgctgcaggaagtcggcccaatgcgcccgcttggggaacaaaatgccatagtcagccgtaggccgccaacggtttggcagtgcctgtccgaaccgatccacgaggctcttggcgaacgcatcgaaggtcagcgagtcgaagcggctcgcatggtcggggtggcaacgctgacgcacacggcgcgcgaggtttcgtgcggcatcgcgcttgaagctgatggctagaatacgctgcggagcaggggacgcgcctgtttgtaggaggaacgcagcgcgttgcgcgagcagttcagtcttgccggcgccgggtccggcaagcaccgagcggtgctcggccgaccgaacgacggtcaatgcattcggctccaggctgtgcacgccgaccggctgccagtcgccggggggaacgcgtcttggcggcaacgacattgtcacaaccttgatacctgagcagagatatgcagcagcacacgctggagaggcgcaggcatgccggcttttaatgcgggcaagtcaatgtgcgtgagtgcgcgcaggtgtgtggcaggcttgctgtgcgtgaggaagtggtagcggtatgcagccatgtggtcacggaacatctgcgcgttgccggtgtaactgatcagcccgggacctgccgttccaagcactacctcggcagcgctttcgttagtcatacgcggcccagctccgtcgatcgtggctgcgtatgcagcggggaaggcggccagcatcgccaggtcaaggtcaagtggccaagagaagaacaccgaggaagagcgctctaggtagctcaaccacccctcgagattggctgcgtcaaatgtctccatttctgcaagccgcttatcgctgagatgcgtcccatcggagagttccagaattttttcgcgaggaacgccaagtgcgagcatttgctgcaaggcattcttgagtcggccatagccaccaccgtcgcgacccagatctaggtcgagcagggtcgcgtaaggaatgcccaggccatggagcagccgccagaaatgattaacgtggcggcctccgagaggcacgatcgcaacgaacgacgggtcgacgagcaggttgagcgcctccgccagccgcggcagcacgatacgctctgaatcgccctcaaccaacagcacaaaacgcgcaaagtacagttcggggaatgcaaggaaggcgttgcgcacgaacttgatggcctcgacgtcgctggtcggcatcgggatgggcagcaccgttgacacgccagtcgcttggttgcgccggcagtagcgcacgtcgtcgggcgggacgcgccccagcaccgagggggaatggctggacacgatggcctggccggcgcctgtctcgacgagcgtgcggatctgctgcaggatacgcgagaggtagtagggcgccaggtggttctcgggctcctcgaccgcgaacaaggtgagggctggtacgttgagttcctcggtcctgaatccctggatgcggcccgccactgcagcccgctccacgtcgaagaccgcggctgccagcgcgaagtagaagagtgactgctggccgtcgctcagcgcgtcgagtccacggtcttctccggccggtccgcgcttgaacatcacgccgatgcgtgcgacgacttcctcgaaccgccggctcatcaggctcagttcggggttgcagtcgatgtcaccgtcgtgcaatttctcccaccgcttggatagcgactcgctgatggcctgaatggcgttctcgcttccaaaggcattcagcaactgctctgtagccgcgtggacggtcgcctgagtgcccgccgaccattcgatggccctgagcaggcgagctgccaacgcccccgtcgtggctcggatctgagtgccagcgtcgcggctggccggtgtgtagaagagctggatcagaccgcgatctcccggggctaccggggaggcttgatcgtcacgtacgacgtcatcagctgtgttaatccagttcaggtcctgactgacggcgccttccgcagtgccatcgtcgtcccagcgtgcgcgaagccgcaggcggcatagaggcgtgccgccggggcgctcgatgcggacatggcgaaacaccggtgcgaccgtggcagcggtcgcgctgccgtccaccagttccggcaggctcaggcgtacatcgattgtcagcgtccgcgatttgaggcgttcggtctcggtcggtgtgacatgaaaatcggaggggacgatcgtgcgctgagcgcgcgtcaccccgaaaagtcgcatcagagcctgcagcaccgctgtcttacctgatgcattcggccccacgatcgcggtgagtccctggctgaaggggatggctgtcgggttagggccgaagcagcggaaaccggctatcgtgacgctttcaatatgcatgaaacggtgctcttcctggctgtttgcaatttatcagatacgtattgtggcaaattcacgctgtatattggtgcatttttttgttatggcatcaagtcgtggcggtgctgagaggcttgcgggtagctagcaagccccctctttcgtagggattaaggcttgccgggcagatgccgattcagaaccaaatcctcggtgcagttatacgcgcctgagcctccattcttttactcgacagtgcctatagggacccccagtgtatctagctcaagcggttgcgtgaaggcgccttctcagttgctcgctgagccccactccgacgccattcccgtccctaccggtgacgaggagcattcgacagtcgtcgccagagccgccccgttagcaagcatttctggtgcttttctagcgaaattacgcgggcttgtcacgatacccttgtttgccagcaattcaatgacacttaatcccaagccgacggaaagccagacatctcacttcgaaaggatcctgcgagggatgagcttcatcaaggatttgctagagatcatactgaaggtctcgccgctcgcattagtagcgcctgcgatgactgtttggctctatcttcgaaagcttggttggtcggaactcttcggtgagtcagttgggtcactgccgggcctgctggcactgctcgtcgggtcgatattaatcttgattgtattcctcctccaggttgtcctgccctcaatctttttcggggcagcggcggaggtgctggacgatgagagaccaaatcctcgtcttgcgtcggcccgggcgcaacagcttcatttcgtgcccgtgctgatgtggcaactttgtttcagtgtctccgtagcatattttccggacgcgatcacgtccccgttacagctcgccactgccgtttcggcggtaaccgcagcggcaatggccgccaaattccgtgaggaccttctacccgcgtcgacgaagcagcgtattaccgtaatgcgacagggagggaacacggcgtactatttgggctactgtgctctgctcatgggcgtcggtattgcctttcccatcgtaatctctgttgcttcggctgcttcgctgctatcgctgtggtggttgacaaaagatctgaatatcacctctcctgcggcctttgtggttctatgctgcggggcaggagccattagcgtggttcctggcttggcctacctcggcgccaaggttgagagacatcctccccgtaagctttggttgctgactgcattggctggcggcggtgttctgtatgcagcgatcgcaacagccatgttctttgcgccaatttccaggcaatcctttgaacttgccggcgtcagcgatacgcagccacacgtttatctactgcagaatgagtcgatcctgccatctataagagcagttgggattcctacatcatccacaaaagagttctttcccgatgggaaggaggccgtatttgttggcgcctatcttcagttcaactttggtggcgtaaagttgctgtgtcggtcgccgtacgacgctgtcgatcctgctgtctctataacagctgacgcgcaacgggatctcggctcgcgctcgaacctgggcggcggatgtttgcccgtgaggcctgacgatgtgcgcgttgtccggccacatcgatagtctgctcttcgtctacggtgagatcgctatgtccgtgagatgctcgtgggcttagctatatcctgacctgtgaggaagagcactgcgtccgggtgtcgtgctatagcatgagcccagaccacggattgaaggcatggaacacatcgtaaactgaagactaaggggaactcagccaagcacatcgggagcagagtcgtcggtttgcataattttgttcccgcccgtcgcccgccagctcgccgtttccgaggtgccaggaacaattttatgcaaagaaattttgcagaacattgttcctccggccgacgttttgcgtaattttgttcgtttcccgggagatcggtcagtcgctgcccagcccgctgcagccagggcacgcaggcggaggctgcaagacggccgccgcgcgccaagccaccttccgcggcgctcccgtctggcccagagggccaggaacaaaattctgcaacattcgggaacaagattctgcaaacggacggccgcggccttcagctttccctcaggccgcaatgacgtattgccaaagcgccattgcgccaacgttcacggcgacagtgccccagaacgaaacttggaactcccgtttccggttcttgtgtcgaagcaggtgctgggccgcaagcgcgcccggccaaccgccgcagagcgccagtaggtgcagggtggtctcaggcgtgcgccacgtgtttcggctggcccgcgtcttgtcgtctgcgtaagcggagaacgtaatgatgctggccaggaggctgacaatgccggcctgtcgagggaaataaccaaccagggcgccgccgacgatgaaccccaaggccgccagacctgcgagcaccggcaaagggctcgcgtctgaccgcgacttcggtgcaccgacgattgcaacgttcagggcttgaatccggccgtccttccctttgccaagctcgaagctcacgcggtcaccaggtgtcggcgtcacggcgcgtgtttgtagcgctgtgacgtgaaagaagacatccttcatgtccgcgtagacgtcgataaagccaaagcccttgtctgcatgccacgtcttgacctgacctgcttttttcatggttttcgtctggtgttgcgcgaaggatccagtttaagggatgccgtcaagcgaaactatggccgaatccgtgaggtcaccaaggtatatgccggctgtctctcggctctgccacccgtagtcggtggggtgttggcttgctgcaacccgtcttgcatatcagatcgggtagatttgccgacggcgggattccgcgccaatgagatgaagaacaacaacaggtagagaaatgggtcgccgaaggaaggagccgtcgcttagcgaaatattgatggatgcgccatggtgggtatccgcagcactggccctgggtgctttcattgtgtttcgcggggtcgtgccagggatattcgcgtcgagcccattgttgacgggcattgccgtgctaagccagtcattagcctgggttcccgccgccatgttcggcttcctgggtgtgctgtcatacatccgtgcgcggggtagggcgggggccaggcagcaagaaatcccgatgagggctcggcgctcccgcacgagccggccgtcgtcggcccccgtgtcaccccggtattccgatgaatccgccgagtcgaaggaggccgttagcccgctggcgaggacagcatccgtacctgagaagccagagatcaatagctggacgctggatgccctcaagttgttagagtggaagcgatttgagctgctttgtgttgggtactacgaggcgatggggttcgtggtcaagactgtgccccatggtcccgatggcggcatcgatgcaaccttgtacaaggcaggcctggatgttcccgtggccgtggtccaatgcaaagcatggagtaagccggtgaaggtggagcaggtccgcgcacttgccggtgtcatgcacgaacacaaggtgcgtaggggcgttttctggtcgttgtctggctatgtagggcgaccggtaaaggagtcggcagagcgagcgggcattcaattacttgatggtgcgggcatcctggaacggatctgcgcgctcgatcagtacaagcaagcgacgttgctgaagcaggcgtttcgcggcgactaccggacgcctacatgcgcggcctgcggaatcaagatggttgagcggcaagggtcagccggcgcattctggggttgccaaaactatcccggttgcaaggtcagactgtcccgcaacgtctagtctaggaaccggctcgatcaatcatcgccgccgcgctctcagtcaacaaggtcactcccggggaaggctggctttccggcaggctcgagcgcctattttctgccttgctactgacacgggtgcttttaggttgcgaaatatgtctcatgaacggtctgcggcatcgccagagccaggtcttcatcactggagaggcgcagcccggcacgccggcaaggacttccgtctcaatccggtcggctcttcccgcccctcaagcgaccgtcgtcgctctacaaagcagccggtcaggcggcggccgttgcacggcggcgttttatgaggcgatgaccgattcgagtcgcaagtcgctcgccgtgatcggcgcgtcggcaggctggagtctcagatgccccgacctcggcgcgcggcttaagccagctgcgggcgcattcactccatagcatgaagccaggaaactgtagcgccaacatgcgtcgccggaacccatctgcctatcgcacgcttgacagaaccggagaatccgaccgtatctgcgaccgaaggcactatctgctggatcccatctgatattggaatagcacgttcgagtaattttgagctttctttatcgccctcgaccaccactagcttgtcctcacgttgcacgcgacgaaagtgggcattgttcaggtgcgatgagatggctggtggccacggaagctccgggctcattgcatgaacggcatggactacgaagtagccgattacacagcaagtaccggttgtgatgccatccccctggaagcccgcatagaaaacaagatagtcgccacgattcagggttaatagctgggagcgctttggatgactaggctccccatagctgtaggtgacgaactccgggtcgtagtgagccggcgcatccaggccaatgacttgcgcgagggtgctgccccgtcgcgacggaatgtcgccgtatctaagggcattgtgtactggcgctccttcaggaataggcacgtattcaaagctgcgatcggcttcaataggagatagccgaccgccgcatccacggtcgattcctacgcgcaggaagagaattttggtttctgacattttgctgagaaaacctgtgtagcgcaatgagactgtttcgtatcgatttttcctttacccagcgctggcgaggggggcgcgtcatgcgcaagatgcaggatagccttcagttccgcatacatatcttcgaacacactgtcagatatgatgacgcgtcgatttgttttcagcatatgcccataaagcagcgggtagtccgactgaagcaatggcccgtgctcgttgagcagaatgaaacgctcaaaggcccatatcgcgtgccctttgggactgacgccgcacgctttcctgcttatcccaacccaattcactttcttcgctattccttcgtcgccaggccacgggcttactcctccaataccgattacgtggttgaagctccagtcccgtaccgatcccatgcagtcattgcatccaaagaggccgctttcgttggggtcacccgtatgggttcttttgtagatgagaattcttggtctgctctccggcattgctctgtctcgatgggaggggcgcagcggtcatcgcggaaatcgctgcaatcgtggaaaacgggcaatggacagattgtcgctaatctggacgtgccagtccaacgaccggttgaatccgcggccggctaccgccgttgcgctacctccagactcgcaaacaagaggagcagctgcccgcgtggtcaggatgctcgtgacgccggtgttaccagggcgcggcaataaggttcgataacgttgccttatcggcgagtaggcgccacgaggaatacagaaccgggggaaggaacagctgtcgtagatgctgcttactgcactttacaccaagaatttgataactattatcaagggcggtacacttcatgacaccggcgtacgccctgcgccggccccgtctgaagaggagcaaatatgatcagtgccgaccttggacagcaacttgagcgctacgtgactgaacttgtcgcctcgggccgctatggctctaagagcgaagtactgcgcgaaggcgtacgtctgattcaggaccgtgaagcgcaactgatggcgctggacgcggcgctcgcgcaaagcctggccgaggcggacgcgggccgcggcaccgacgcagccaccgtgttcgaccgcctcgaggccaagtatcgcgccgcggcaggcagaacacccgggcacggcgcatgatcgtcgttcgcctgacgccgctggccgaggccgaactcgaagccatcgccgactacattgcccgcgacaacccgcgccgcgcgctttccttcgtgcgggagttgcgcgaccggtgcctgtcgctcgcagacatgccgcttgccttcccgctggtacctcgctgtgaggaccgaggcgtccggcaccgtgtacacggcaactaccagatcttctaccgcgtggtgggcgatccgcctgcgcgaatcgacgtgctgcacgtgcttcacagcgcccgcaactatgccgcgctgctgttcaactgaggcctcccggccagagtacggcggtagacattcggggccgcgtcgcttcggcagcccgacgacttaggtatcaaagtggagggcggtgcgccatgatcgattctgcctcgatcacgaagcgccccgcgtgaacgcagccaaatttgaacatgacgcccgtactgagtaattttgccagtagcaggggggttatgtggaatggggagggtgagacgtcggtcggcgccaccggcacctcagtcggccgtcgaagcgcaggcgctcgaaacggcagcaaagtcgaaatgcgcggcggcatagatggcattgcaagcccagacttcttcgccatccttgtagaagatgacccatttgccgtcgctgacgcagtgggcgccaggaaacacttcgtcatggccattcggtccgtccagcggaaaggacgcgtggggtgtggcccagtagcggcccttcggtaggggctcgatcgtctttggcatgctcatcaggcccagtgaggtgttacacaagacaccatcgcccagtgaaggcgaaacgggggatggtgtcaccctgcaacagcgaagaccgtccttcgtgtaggcttcaccatccaatcacctgttgctacccgttgcgatgtcgatggcacgatacctcttgtttgtggcccgcgccctcggcgtaggcgccctgatcatgatcgtcgccatcgtctcccggcaagtatatttgcgcagcgctgcggaggctgctgacgccggcgcagacgaggagtctgcggaggctgccgacgccggcgcagacgaggagcctgcgacaatgatgttgatacgctgcgagacgatgcacgaacgtctgcagaaccggcacagctcggctgcgaaggctgacgagcggccacgcgctcgttgcagggagtcctgacttcggagaacttccgattagtcgaccaggagctaggccgcacgcctggtaggcgacagcggcgaatgagccgcgcacaatcaatactttcatgatcatgaaagtattgattgtgacgatgggccccgcggacggctatgctcgtcatcgctagccgacccacagcggatcgtggttcaagcgcaagaaaatcggccacgttcgggggagccgccactcgaacgttccgcataaagccgtgggccaacgtcagtatatggccgatctgccaggcaatctgtctgtcacggcggtgcctgaattcccagaggaccaccctttaccgccagacattgcggcatgtctatccggcgctacgactccagaatctccagcccactttcggcacaccattgcctcagcgctctttcggccgagtcggcttcaaacgaataccagagctcgagaatgcctttgcgctccagcaagtccttgaggcgcgcgtaagcgccttgtcgccggaagaattcttccacctggtcgcgacactcaggcaactcctgtgcaacaaattggagggcgagacttcgtccaagaccgagttcgttcttatgcggtatcgcaaggtagcggtccgaggtttcaaggtcgtcaggaacctcctcgtcgaaggtgtcgttgtaatcagaagtccaatagactttgcccgtatcgagtgagacatacgcgttgtgctccatcggcgccgcgcagctaacgaagtcgaatgccatggatagatcgtcgtgtttgactgcgaccatgtctgtactcccatgggttgcgaggtgaacggcccagcaatattcggtgacagccggacatctgtcttcgtcaagggccgatgcatgatgatggtaccgcagcgctcatcgcggcccgaaggccgagctccatggtcatccaccgaccgctgaaagcgcatcgccccgcacgtactcttgccaggacaatttctcggaatatcacgacggcttccatgcgagatggaatcgaagtttagcgggacgtccccttcaccggtcgagtactgacgcgcttccttgttgcagcctcgttctgcgttgcaggcggggtcgccacgtttgctttaccggcaacaacgttgccagatgctgatttgcgtggccctgcggatgccttgactgatgacttcttggttaccgacttattatcctccgcagtcttcgcattcgcaggtggcttacgggttgtcgagacggccgacttggtcgccttcttcgctgtcaccttacctgccggtggcttgttaagtctgacagcaggcttcggcggtgggttagcgtcggccatctcgatgccaaacacgtcggccaccagggcgtcgtcgagcaccttgctggtggcgggtcgttttgtcgatttgggcaggccagcgccggcctgcctgacgagatcattggcatcgacgcggcgcagggcgaagagcaattccggctgttggtcgagccgcgcgccgatgccgtaaagtacggcagcaacgtgcttgcacattgacgcccagtccggacaactgcaactgaacctgatgtcttccggcatcgggaaaagaccgctgcgaggtttgcagatgcgctccatcacggctgtcgagagcttgccctgcaagagttccacgatcgaatcgatcgattccgcgcaatcggcgccgatcgctcgccattgctttgcgggacatgccgtcacggtcacagcgaccgtgtacagactcgaacccattacctgcgcgcggacttcgcctgccgtaatctgaaggtcgatcacggaaccgttgcgcacataggtacggccgcgcggcaggcggttggcatagtcgctgtagctttccagattgtcgcaccaggccttgccccagaaggtcttggcgatggcaccgcggtatgaggcgattggcgacagcaccgaaccagccttcttcgccttctcggcggctcgttcagccttctttctgcgctcggcgactgagacatagggcttccatcccccgtaaccgtaacccattccggttcctcttgacgatcagttttcttgcgcggcatgaacgtcgagcttcacgagatcgagcaattcacgattgctcatctcggtaagcaggagttctgcgccgccttccaacacatccttcaccaattgctgcttcgcttcgatcaactggtcgatacggtcctcgaccgtgccacggcagataaacttatgcaccaggacgttcctccgctggccgatacgaaatgcacgatcagtcgcctggttttccaccgccgggttccaccagcggtcgtagtggatcacatgcgacgcggcggtgagattcagacctgccccaccggccttgagcgagagcacgaagaagggggtcagctcatcttcctggaatcgcttgaccagttcgcggcgcttggcgaccggggtgccgccatgaagcaccagaccttcgcggccaaagatcgaacctagaaaagccgccagcggctcagtggtctcgcggaactgggtgaataccagcaccttttcctgtttggcggcaatgacttcggccagttggcgcaggcgggcgaacttgccactgtcttccgccttccaggcggcgtcgcccaaccactgcgacggatgattgcatatctgtttgaagcgcatcaggtagctcagcacgacacccttgcgaccgatgccgtcggcatcttcaagcgcggcagccagatccttcaccgcacgctgatacagtgccgcctggctcgggctcaggtggcaccaggccttgagctcggtcttgtccggaaggtcgtcgattatccgcttgtcggtcttcaggcggcgcaggatgtagggccgtacgagcgttcgcagcggaccgaagtgctcggccttcgccagccgcctggtaaagtcggcaaagactttgtctgagcccagcaatccggggtgggtgaaatcgaagatggaccacagatcggacaggcggttttccacgggagtgccggtcagcgcgatgcgcgattgtgcctggagctgcttgacctgtcgcgtttgcttggcgcccggattttttatcgcctgtgcttcgtcgacaatggcaacgcgccattggaaggctcccagtaccggctggcgaagaagcgcgccaaagctggtgatgacgagatcgatgtccgcaagtcgcgccgggtccagcgcacgcaattcggccgtcggcatggccgacggatgggcgatcagtaggcgcaagccgggggcaaagcgctcagcctctgccgcccagttggccagcagcgatgcaggggcgaccagcagactgggccgcgcctcggcactttctcgcttcagcacgagcagaagcgagagtacctgcatggtcttgcccaggcccatatcatccgccaggcaagcgcccaaaccgagccgggtgagcaggtacaaccaccgcacgccggcctgttggtagggccgcagggtggccttcagttccggtcccgggctgatctgcgccaacccctctggctgacgcaactcctgcagggtgtcagccagccagggccctgcaacaagctgcgaccagtcgcggtcagcggggtcggcactatcgtcgagcgaaacccccgccagaaggcgtagagcctcattaagcggcagaccgcttcgcgccgccttttccatggcctcgaatcgcttcatgagacgactgagctttttcttgtccacctcgacccagcgaccacggatgagctgcaagccgtcggcgcctttgagcagattcctgacctcggtggcgctgagacactcgccatcgagcgaaacctccatgctaaagtccagcaacgcgtctttgcccaagagcgagggtggccgtgctccgacactggctttcacaacgggacgagcagggcggcccgcctgccagacgcctggcatgcgtacgacaatcccggcagcttcgagtttggacaggtccgagagaaggcgatgggcatcgagcggcgtccagcgcagcggatggtatatctcgccggtatccaccatttcgcgaagccagtcgcagtgttccgcggcgcgctgcaccggcagcagtaatgacaggagctgcgccttgctcctgactcccgagaattccgccagggcctgcgacagtggctgatgttgcgctttaccatgggccgacagacgcgacgtgtaagtcgcaaggaaggcgaacggtgactccgggtccttgcggttctcagcaaggttgaaatgcacgcggccgacgagattccaggccgggtgacgcagcttgaggaaatcctgaagcgagacgtttgcggtcgccagttcctggtgcaaggcagtattgatctcgccccacaacgtgcccagcacggctggcgtcagatactcgccgcccgtcatcggcggtgcatcgtcaatcatggcatcgaaatccttggcagcaggcgttgcgaccgcgatctcgccgccttcgggcgtggcgcacaaggcagtgacatagcgcgccgcaaaatcacgccaccaggcccatgcagggggcaaaatgcggccgatttcggccgttcccaggtgcagcaggccatgtcccgcgccaagcgcaaaagaactctcaagccgctgtcgcgtttcatctgccaagattggcgcggcgtcctccggcactgcaagcaggtgcccgccgggcgtcaggtgtggcacaagaatgtcgggcgcagtcacaggtgcccgttccaatcgcactgtttcagcaagcgctgaagctgcatgttttcaagggaagcggctgcgaaatccaccagcaggccctccggcctaggttggactgggtaaatcttcgattgcctctggaccgaccgaatgatcggctcaagcaaccctccagggtatgcctgcctgctgcgctgcacatgtcttgtgaactgtctattcatctgctgtaggacaacctgtttgctagtaatcactcacgcaaattcgctcccggctccgctaccgaattttgccaaaggcaagcacgactttccatgaaagggtaccaaaacctcagtcacacgagatgggatgccgccggcgtcccccgcacggcgaaaatcagctggcgcgcttgttacaaacgacaaaatggcggagtgtcccgaatggcctgaatcgcttcgaaggcgagtgacggggcgaatggcagttgcctcggcagagccgaccgttcgagtgtctggagatggccggctacgcgcggcggagtctggcatctcggctgcccttggccgcgccggccgagtccgttgcaatacaacgaagagatagacctctgttaggcaggcacacgtacggttatactccgcgcttcacaactaacgggtaatccataatggtcgctgcaacgaaagcaacgaaggtcagtgcagtctcgaagaacaagtctgccgccaagaaggtggccgtgccaacgaaaaaggccagcgtgctcgcgcgtgaggctcaggcggcgaaaaagcgcttgctgaagctgcgcgccgacatgaagaaggccattgaggcagcaaagcgcgaagttgcgcaggcagtggaagccgccaggtccgcgcttcgcttcgagaagcaagccgcaaaggacaagctggcggcgaagaaggcaaaggctgcggacgccaagaaggccgcgggcaaagtggccgccacgaaggcagccccgaaaaaggcagtgaccggtaccaaagcctccgtgaaagctgcgccgaagaaggccgcagtgaaagccgtgacgaagaagcggactcccgcaaaggcagtggtgccgaccgtggcgacacccgaagtttcggcgtgattttggcctcggccggtatggcacttcgccgaccggtcgatgaccgaagatgggcgcacagcttgcgccaagcctgctcgactgagtcgtgtatcgagccattagctcagcaaattagaggcaagttgtgcgaacatcagggtagaatttcgcgcgacgttatagggccggacgccgtgttggttgcaggcagcggactcataatccgccggagacatcccaccgtgggttcgaatcccacccggcccaccaggtttgcgtctgccattactgctcgatgaggatgaactgcgtagccgatgcatttgccggctcgccttggatggccgcgcccgagtcgcgcctggcaggtgagcctagcatcgcgatctttgacgatcgcacccgactggtgtgctatgacagctccgctggtcgagcccggaggtacaagcggcaatcgcacaacttgaggctccaattctggattgctcagggcgtctcgctgacaaccgatctggcgaattccatgatcgcgcacggctaccgtgctatcggcatcggtatggctggtctctacgccaacgtgggctggcgtaggtcatcgacgacatcgatcgactgaagttcgccggtcgaaggtaggctggagtggaagggcgcctacgcctcgcctacctgaaatgcgctgattgggcgagacgccagcgtcttacatgtcgtctcgtgtcatatcgcaaatccaagggaagacttcagtatgccagacaggtccacggaacaagtcatagtgagtacaaccggcaatcgtgaccagtcgcctgtcgtgcgcggataggcctcggcacaggtcatgcgcggcgtgggtctgcccgcggccggatatgtcgtcgagctcgccttcgatggtaagcaaggcggtggaacggatgtcctggggacgcaccaactgacctcgcactcgccaggtgccaaaggcgatctgaaactcctgaaacacggtccgaaccgtgtcgagataaaactcggcggccatgtcgagcaccgcgctgtagtccagcaatgcttgccagtgaacattggctcgctcggcatcgccacgagcaaggtttgcccagtacccttcacataggccccatagcggtgatgactgcgcagcggcgagaccggaaagttgcacaaaactcggacagacctgacgtccagcacctgcatagggatgcggcactgggtaaaccagattgcgtcggaaccactggatagagcggctcgaggcgaggcgcccaattgcagtggggctgcgacgcgcgtcaatcggaccgccgatgagagtcaggctggttggcgtcgcctcatcgcggcttgccaacagcgcgatggcgccattgctccagtcagtgacatagacaatgtgctcttgcagtagcgattgcaccacgtcgcgaagcatgacggcgtgatgcccggcaagcggcgcacagacgagtaccgcgggaatcccttgctgcccgttatcatgcccaaccgctggggcagcttcaaagcgcagcaggcggcaaaaagggctttccgatacgagttgctcgaccacgggaacaacacggccgtcacgaaggatagcggtaacgccaaacgtcggttcctcgctggccgtgctcaagcgatacaggttttcccagcaggcggccaagttcccggcccccggaagatatgcaagtggactagagggctgaccaaggctcgggcagattcatccgcccacgccttcatcagggtccgctgatattcaaaaatctgatagagcatgcggaccccaaaccaacgaatgcgtcaggagaaagagcgccatcactccgaaattgcggacgttgacgcgctaccgcaaagcgcattgtcaaggtgcgtggcactcacggcggtcagcagaacgctaaagacgctgccctgaagccacgttgaggtcgccaacttcaagcggagatgaccgttttctgccgtggagccggcggctccgtttgcgcccaagtttaacgcctagcgaatgcggcgtacggcgtcgagcagagaatgcccccggctggtcagacgcggatgggcgccgctgtcatgaccatgctccatcgtgaccagtttctgttccaacaatgcgtccaaccgatcgggatcgacgtcgtgaacgtccggtgcatcgccaagcagcagcagtgctgcgatttcatgcggacttagcatgtcggtctccttgatcgagtcaaaagggaactgcgacggctgatctgtgtaccgtgctccacgggggagttaggaaccgcaattggatgatgtcggtgcaaggaacgcgccgggagcgctacaccgaacgtttacggtaaatccttcagtcgtggaaagcaagtgaggaatatgctgcggggcagcggagaagtccaatccccgattgggatagcggcccggcaggcggctgcgtcagtgtggcccgaaggtcgtcgtgaacctttcaagacccgcgcttttccaaaacgggccaattacggaccaacgcctctcggcacgcttcaagcgatcactggcctccttgcctgagtgcagttcgcgcgaagttcactgctcaacgtcgcacaacggcattacaaaagcttcagtcccgccatcgtggcgcgtgccgggacactatgcgaaaactgccgagctcggaagttttccccacgtcaaggctgcggcgtacccgtttctgcgaacgttctaaccaaggattgttagacaaatgcagcctcgagtactcggtcgaaattttttggaccggccgattgccgtgagtgtcacggtcagggccacaagcctgaggctggttcttatcagttcaaaccgaggggactttgcacccgaatcacgcgcattgttttacggcgctccctttaatgcagttctcgctgcccttaccgcatggagcctcactgtggcgcggcggtggtactcagtcgctgtcatactttctcgctcagcttttttggtcatgattcggagccgccaagcgaatcattggactgctcattacccagaaggttaaagtttttatgccctgaagatcaaattggctctaaactacctatctggatctctcgatcggaaaggaaaccagaagatggcaacttacaaagaactgatggcgcagaaggcagctctggaggcgcacttggaagaggcacgtgcgaatgaagtcgcctctgtcatcgagcagattcagaacctgatggcggaatacgggctgactgtcgaagacgttaccaaacgccgtcgtggtcgtcctgccggcagcggcgctggtaaggcgaaagcgggattgcccccgaaataccaggatccgaagacgggcaagacctggtctggccgcggtcgtgcgccgtcctggcttggcaagaaccctaacaagttcctgattgcagaagaggcgtaaataggcgcagcacgtcccgccagaatagtgtccaacccctgcatgcaggggttttctttttgagagcaatcgccatgtcatttgaagtgattcatgccgatatcatgctcgcccggccaaacttggttcctcgtgaacgtaccgagcgggggatacggaacggctattcctactggctccggcttccgcccagcaaggtactcagagtgatccgcctttcgcaccagtctggcgacagctatgagttggtgcgtgcggccagcgagcgcagaacgcgtcagaaaatacgtcaacggttttccgggtccatagccgagctgatagccattattgacgaagagatcgacatcctttgcaaggatgagcgcttggtatcgaagcctggttcataggtttgctggccaagaccaggccgcccacgagaagcagggcggtacgttccgatccacgcggccgccgtgccgcttcagtttcgtagaattggcgccatgtcgaccagcgaggacgctctcgggtcgaagtgaagggcctgagggtgtaacagattgggccgcaagacggaattttggcccccaaagaccttgtgactacagcagaagagcctacgaggctgggcttcgaccgatcgattgctgggatcgtagatgcaggtcgcccattgcggcccaattcattgcaccttggccgtcgcccccgccaaggggaaagcaaatgcagcgcgagagcctcataatccattggtcggtgctcgactcacggggcgcccaattccacaccactatcgttgcgccaacgacactcgccagcgaccgagcgtacctgtttcagcgtacggcagtttggttttgttacggcgaagcatgacgaggcgctgccacaagaaccaactgtgtcttggcacaccaaccaagccgccgagtcaaaattgggaagggcttgcccgtcacgatcacatagcccctactacgcggctcgcaccggcaggcgccgccggcgctgctctgtacgttactggtgtcgggagcaacttcagcgtgatcatgtgacaacacgtggtggctgcgcgggagcttgaacttgccgattactgccgttcccaggacatggatgtcgacgcggcgcgcgctctcgtccgagaggtagagagcatttttttgtaccctgtgagtgcgtgcaaacgcgaaaaaacccgaaacgttaccgcgtacggatgtaggcctcgaagagacccgcgtgcaggccgcgtaagtcctttcgccgttccagcaaatcatgctggcggccctggcgctcaaggttcaacaactccagcatgatccgcaatcccttttcgggtaatgtgcccgtcgagggctcggacgcgcgtaagagggcagcaagtccgggtttttcggtcaaggaccaggctgggagccacgcgagatcatctagcgtaccgtcaccatcgaatttcgcatcgaaccgccggcgcagcgccagcaatgacgaatcaccgagcgtttgtatgagcgcgccgagcttcttcggggatagccaagcaagctcggccaagagcggccatgccgggtcaagcccctgtagccggtagaccgtctcggccatccaggcgaggggagttggaattcgtcgccatgacccaattcgcttgatgctgtcagatgctgcagtccactccgcagcgcgcatccataggggtgccgcatgccattcgggcatctcccggtgaaacggcaattgagaggcggctcgggcaacagcacgccacagcggtaggcaccaagccatgcccgctgcgtcgccgaatgctcggcgcgctgccggcatgcacggcaaacaccacccttcgcaggtgtcgcgcagtgccgtctgagtcgcgaagtgttcgtggacgggagcctccagcacacagacaagtgtctccagggtcggcacaagcgtgtcgtccggatattccgcgaccaggcgctgcagtgcttcacgcccggcggcggcattgcgttgctcaagcgctgtgagcacgtcgttgcgaagcatgacatcgcggccatcttcaaaaagatcgagctgattcgtcacggcgttcccgttggtagtcagattgcgcccctgcaggaccggcccgacatcgccgggcacaacaagtcttcagggatggtagctgctgccgcgactacgggcaatccgcaaccggccaaccagatctcgacgagacaagcgctacccgagggcggccaggcaaatcaaggcgcgacgcgtggcgctgattctgccttggacttcaggactccgcccatacagcatcgacatctctcgatagatgtccagcgaggatgtagtctccgagcttctccgcttttccctccaggcgctccaagtcagccgctggtagcatgctgagctcaaattggcagtaaagattgcgctgacggaacgtcaactttggacgactcagtcccgcaacgagtgcggcgggcgagctgacggcaatgctctcatggccgcgatactggacacgtatgccaagcttttcgcccagcctgcccagctcaatcgcatcctgccatcctgattcgtagtccaattccacgaccgtgacgcccactgtttccaggagctttagtgcttcgcctttggtcgcagccagatctgtcgccattgccgcctcccctgctcgtaggacctgtggcgattcgcgcgcttcgacggcccagattcatattgcatagcaacattgtaagcggggaacggtctatttcgtcaggtcttgtcgtctcgcgtaccactttgacttaagcacctgtaccggtcgaggcagtaaccttgcgggcgcaagtcgcgattacgccttcgacagatttgtgatcaggtagattggtgatcattcagagataatcgggtgacagcggactgccactttgcaaacggagcgcgctcgataggtcatgcacagttgcacgaggtcatgcagggcgcttttacccagaccgtggccgagacgcatggcgggcctacacctgccggccgttcagattcaccgccgtcgattccatcaaaccacgtcacctatcccaaagaccgatgtctgaaggccacgtattcatttgcggcgacccccatggcgagttcggcccgctgattgaaagcgtccaccgtcaccgccccgaagcagtggtgctcgcaggcgacatccaggccaggcgcccactggatgaagagctcgccagcatccttcctctgacgcaggtgtggtggattcctggcaatcacgacaccgacagcgatgccgactacgacaatcttttcggctcggccctggccgaccggaacctggatgggagggtggtcacgatcgcaggccttcggattgccgggctaggggggatttttcgcggccaagtctggatgccgcccgaaccagcgcgcatggagagcgagtctgactatctggccaaatgtgggaaggggaattactggcggggtggtctgccgcggcgccatcgcagcacgatcttcccgcagacctacaacgcgttattgagtcagcatgcggatgtcctggtcagccatgaggctccggcttgtcacccacacgggttcgaggcgattgacatgctcatcgaagcaatgcgagtgaaacgagctttccacggccatcaccacgaatccacggcttatccgaccgcaggaccgtgccgcatcttcggtctcggtgcgtgcgcggtggccacgatcgagggcgagttcttgcccagcgtcctgacttgtccggatcaagtcgaaggaggctagaccaacggttgaggttcacgggcaacgctgtggggcgccagcgggccgggcaaacgactggcgcgtttgcgaattgtgcacgatggtcagaccgcccgcaggtcaacatgacaccggcagatccggtgatcgatcgcgcagcggcggcggccgtcggcaagttggacgcgccggttgccagatggtgagtgcgaccaaaaaaacagccctcgatccgatggaggagagccgcagaaacgtccaagaagaaatcgggaaacaccttgcggcgccacccacattcagtacccaccaggttgccgtggacggcaatccagcctggcgccgcgcagttcaccggttcgcgaaaaaagaacccgcgctcatcaggggacgggcgcgggtggtagcaggacctaccggagcaggatacggcgatataaacatcgcgcaacacaggattaggaggcttttttcccggcagttcttttgccagcgaaaaaattgtcatgtagcgggcagacaatggaacgatgggtggagcctccgaccttgcagggccgcctcgatgctgttggagcgctcggcgtgacgcattgagtcggatgcactgctcgccggagaactcacacgcgcgcggacgtaaaaagcgagggagggtgccggcgttgaatcctatggacgctgcctttcccgcgacttctgcgcagtgtcgtcggtttcctgcagggaatgaagaaaatctcccaccagtgcgacacactcgtcaaagcatctgttgaaattaatccgctggatcctgtcgaactgctcacgcatgatcggcgggccggcctcgacctggccccggaaggcggaggcgtgtcgaagcagaaacggcgcagcgtgtgtgtgtgccgtcggttcatgctcgaccacgacggccaggtcaaagagatcccgcgcagtggcacggtcgccacgatggtaaagctttttggcaacgatctcggccgcggtctccaccttgacggattgccccatgatctcccagatttcgaatggcttgtcggtcaggttgggcgaggccacgacgtcgatttccccagcgtcgagcaccagcttcacgaaatccccttgctcaacgtagtcgctcgtgatgctttccgcggcctcgctcaaacgcggcgacacgaatcccaggcattgcggatccgggacaaagaggtcgatatcgcgggaaaaacgatggcggtaccgaagcatcaggaccgtcccgccgccgaaggtccagaacggctcaatgcccccgtgctttctgacctcctccatcagcgtaaaggcatgagggaacaggctttcccagatgtcgccctttagttcaactttcatgcccacaggcctccgcgcgtgaccatcaaggtctgcgcaagccgcctgaggttcttccagatgtcggctggattccgatgttgcttcgccgctacctccgcgaccaccttggtgacgagttgcagaggcgcctcgtccaagacatgggccacctgtggacgatactccgacggcacctcgccggtggcgagggcgcgctcgagctcgtctggcgtgagctcgccggtgtagctcacgttggcgcccttcgcggccatccacagcgcccgcattggcgacccgctagccaggcggcgctcatcgggatcgtttatatcaagtgctaagccgagcacatccatcagtcgcccgagcgactggagcgtagcgttgacgctgccgtgttcaatgccgttcagcgactggcgcgacagccctgccatgtcggccagctgctgttgggtcagccccaaggcaacccgcttgcgctggatcgcgttgcccaagagagcgggattcatggcgataatctccaaacatgtgtcaagtatagacgacaagatggatggttggctttccgcctatgcgggggacgagttcttgggatcccgaaggcaagactcggcgtgcgatacgtcagatcgcgccgcgtgagcccagcacgatccgggcggtccgccggtcgcacgcgggcggggctggacgacgctggcgaccaagcttggcgatggcctcgtgcttatcccctgagttcggcagtcacatatttgcgcggcgcaacatccattcaaccgcgcgcacggcgtttccggtcgatcagcgcctgagcgtcgtccatgatctggtcatgtgggggcggcggggccgggtcggtcagcgcttgctggacctttgcgcggaaccaagcatcataggtctcgggactcgtcgtcagaccgggcggcagcccgccttccttggcgatccgtgtcaacagaatgcgcactgcgtcggaaacggttaggccgaccctggcgaggttttgcgtggcgcgggctttcaggtcgtcgtccacccggatgtgcagcattgaagtatgcgccatgaaaatctcctatgcattgaccgacattatgtatctcaattgcgatataaccaaggtaagcgcattaccttgtccgcaagcgccacgctacgttcagtgagtcgttgcggtcatctgtacggaacgcatgcggcaaccgcctcgaagaagtcagccgtcagttgtcacgtaacaatcgacagcacgagacttccgagcgctcaaagcgccttatgcaatactttacccatcatcgctgacataacatcctattcttcagaagtgcgttggggctcccaaagctcaaggggcagacatgcggctagctgactttatcttgcgcgatatgaagcacattttgggggaataagaggcgtttgtggccacccagctgcctgccgcacggaatctggattctctcgccctgcgcgacccacgcaccgcagatcttccaagccattgccaaagatcttaggacccccgcaaacgagcgaggcgcagcgcgaaaaatccttgggacgagccccgaaggtgcccggtgcgccggacactgcagcccaaattcacgccgtcatccgggcgcgcggtggcttcaacatcaaccagttggtcgccgagtaccgggcgctacgcgcgagcgtgctgcgtttgtggatggacgagtttgagttggtcgccggggatctggatgacgtgatgcgattcaacgaggcgatcgatcaggccgtcgcggaatcggtggattttttcaacgcggaagtcgagcagtctcacaatctgttgttgggaatgcttgggcacgatctgcgcagtcctctgcagaccatccagatgaccgcctcctatctggcggcgctgaacgccggggagaaggtgtcggaggcggcagcacggctcattcgcagcggggccagcatgaattccctgctggatgatctgtgcgatttcaaccgaacgaaactcagcttgggtatcaacatcgctcccattgaggtcggcctagctcacgtcgttggcgataccgtggatcagttgcgggcagcgcatccggaccgccgcatcgaccttgagatgaacggtaacgcgctgggcgtttgggatggtttgcggctgcagcaagtggtttccaatctggtgctcaacgcgatcaggtatggcgcaccagacgccccggtccgtgttgtactcactggtgacgacaccgaagttcatctcgcggtgaggaacagcggccccgctattgaccaactgacgctggcgcgaatgtttgacccgctaagcagaggtccggatccggaagacaagcacgcgcacgggctcgggctcgggctcgggctcgggctgtatatcgcgagcgaaattgccagggcccatcacgggtcaatcgacgcccgctccgaccaggcagagacggcgtttgaggtgcgtctgccgcgtcgagcatcccaaacgacttgagtggtgcggtcgctttgcctgcccgggcgtcgtgcagtgccgtcgcgatttgcccgagcacacggcatcgtcaggttcctgtccgaatgcgggaccgggattttgtcgtcgcggcgacggccggtgccgccgggatcggctcaaaaagggcctcgatgtcttcggcggagaatttgacggcgccggcggcatcctccgacaggatcgcctcggccagcgcggctttctgcgcttgcatcgcgacgattttctcctcgacactgccaccggtgatcagcttgtagacgaacacgggcttatcctggccaaggcggtgtgcgcggtcagtagcctgattttccacagcaggattccaccagggatcgtagtgaatgacagtgtcggccgctgtcaggttcaggccaacgccaccggccttcaagctgatcaggaaaagcggtacctcgccttgctggaagcgttcgaccggggtgatgcggtccgtggtatccccggtcagcatgacgtagggaatgccggcgtttcgcagggctgccgcaatgagatccagcatgctagtgaactgcgagaacagcaggatccgacggccttcctcgataagttcgggcagcatgtgcagcaacaggtcaagctttgccgactccttgatccgggccgcctctttgatcttgacgagccgcggatcgcagcagacctggcgcagtttgagcaacgcctccagcacgatgatgtggctgcgcgcgaggcccttggcagcgacggccgcccgcaccttttcctgcatggcagcgcgcactgtttcgtacagatcgcgttgtgcgccttcgagttccaccgtgcgcacgatcgtcgtcttcgggggcagctcggtggccacctcatccttgcgccggcgcagcatgaatggccggatgcgccgcgcgagcaggtcgcgtcgaacggcatcgccgcccttttcgatgggagtgcgccagcgtcgcgtgaagtcctggcgggtaccgagaaagccgggcagcaggaagtcaaactgcgcccacaattcaccgagatggttttcgagcggcgtgcctgtcaggcagaggcggtgtcgcgcacgcagtgttcggatggttgcggcggacttggtggcggcattcttgacgtattgggcctcatccagaagcagcaggtgatagtcgtggccggcaaggattgcctcgtcacgccacagcaaggcgtatgtggtcaggatcaggtcgtgctcgccgatctggtcaaagcgatcgtgacgctgggggccgtgcagatccagcacgcgcagcgtcggcgtgaagcgctgggcttcctcgcgccagttgtgcacgagggtcgtcggcacgacgatcagcgcaggccggtccagccggccccgttccttttccgtgaggacgtgcgcaagggcctggatcgtcttgcccagtcccatgtcgtcggccagtaccccggacaacccgtgctcgcgcaggaactgcatccaggcgagcccctggcgctggtaagcacgcagttcggccgtcaggccgcgcggcacgggcacgtctgccatcccgggacccgccatcagccgctgcgcgagctgccggatcgatgccgcgccgtcaaactgccagcgcccggtctgatccagggcatggagccgggctgcatcccactcggaaatgcgcatgccggtgttgagcgcgtcgaacaggtcgatcagcacgcgcacgacgggtttcagccggtcggcacccaggcgcagccgctcgttgcgctcggtcttcagatcaatcgcttcgtcgtcggggatgccatccagcctgcctgacaaccagcgcgaatcccggcgaaagaggtcagccagcagcggctccagacgcaccgtacggccgttgacagtgatgcccatctcgacgtcgaaccagccatcaccggtctgacgcaggcggccgtcaatggcctcgatctcaatcacattgtgccgaaacgcgtccgtcatgacgacgcgccagccacttgcgcgaaggatcggaagcagcaccttcacgaggcttggccagctggcatggtcctcggggccgagcatgtcggccggaaacggggctggcccaaagacatggtcggcccgaatcttccggaacccggcctgttgcagttctgtcagacgcttgcgctcgagatcggcgtcccgtttgatctggacgacctcgccaccggtggtttgaaggagagtggtgctgctgtgcgccgggaggctgtgtcctgcgtaatcaaagctgaccgtcgcaaaatcctgcgccgaggcccatgtcgacaacgtgtccagggccaggacgggcaccggcgcgcagtggatgcttcgcaccgacgccgtttcatgcgcaggcggcatcgggagttcgggcgccacgtcacgcagcacattcccaaccagtgcggcctcgtccagcgtaatggccggcatggacaggaaatcggcgagctgttcggagggccaaggcatcgccaggatgccggcttcaccagcatccgcgtcgacgtaccagcacggctgggtgctcgtcagcaacagggaagcgggtggttcggcttgcagaagcggccgcacgcgcgtgtcgggctgcgcctgccaagtcagttgcgcgccgcgcgcggctccgacttgcagcgcacagtgcgtgccgggatagtgtgagcccgcgggcgaaaaggaaacaaaagcccgtccggttgccatcagttgctccaagatgacggcaccggttgcgccccgcaggccaaaaccacccatataggaggcatgtgagcggcccagccatagcccgcgcaggatcggcagatccgcttcggtaacaaatttggggggttcgaccagcgccttctcgatgttttgccacggatcgtcaagcgagcgaatcgtgccgtcggcgccaacgcgtgccttgtaaatcgttacctcgccgccgcggtacgattggccgatcacgtaggctagggcatgcgtgggcttggacggctttttcttggccgcgggattggcggccgtgcgcctggcacgaaagccttcaagccagctcaccagttccgcgcgcacgccggtggacggtggcttcggctggtgcgccaggccggcgatcagcagcgctgccacatgcttgcagtcgaccccaactggacacgtgcattcgccttccacccacatgtcgtcgtcgacgtcgtggaaatacacacgcacgtcatacggacgcgtgcgggtgccttgcaccaggcccgccagggtgtcctcgtcgatccagcgcaactccgagacggcactcgcatagggacgcgccttggacaccgtgaacggatccagccattgcgcgatttgcctggattggtaggggacagacattgactgaaggaggccggtggacaacgtcgggagcattttacgcggctggactcgcgaccggtaaggcagcagatcccaaatcgaaggcgagctggctcgtctcggtaggctgggccggcgatcgtcctcggcggggaattcgagtcgtcgtgatcgacgcgggcggagatttccggcgggtgtcgacgccgcttcattctgcggggagggccggcgtgtgccttcgtcagcaggtcaatgcccaactctaatgtctagtgggtacctcgaccagaatggcgcaacggggtcggccgcccggtcgaacaattccgggaccttccgggacgatcagtattccctgtggcaaggtgtcgaactgacgctggagtcccattgatgtacaattgaaacgtacatatcaagcaagggagcacctttccatgcaaactatcccgttttctgaggcaagagcgcacctcgctgatgcgctgcgaggtgtagaagtggcacaagagcccctactgatctcccggcgcgggcaggctgccggcgtcttgatgtcgtggtctcaatatcgacagctggttgggtcttcctctggcttttctgcgcgtctggcagagtggcgccaacagcatttgacagaagagaatgagagcgatccctttgcgcaagtacgccaacccgatgggggaagagaattctcatggtgagcgccgtgagttggttgctcgacaccaacattgtttcagaggccatgcggccgagacctgaggtcgcggtaacggacaatttggcccgctacgagggggagctagcaattccggccccggtctggcacgaactccgttatggctggttgcgcatgccggatggccaacggaaggacgcagttggccgttttgtgcaagatgtcgtgggcactttgccagtcttgccttacgacgctgccgcagcgcggatccacgcggagctgcgccagtcacgcgagcgggctggattcacattgccattcgtggatgggcagattgcatcggttgcgatagcgcatgggctaaccttggtgacacgcaatacgaaggatttttcggaattgactggtttgcggctggcgaactggttcgtcccctgattgccgcgaggacgaggcgatcatcaaggcagccatcgacgccggccaggaaaaaggcattcagcagccaggccgatctgcgcaagctgattggtgtcgacctggcgtaatgaactggaacagcacggaaaaacggaaggatggtgctgacgttgaaagatggagaaccgcaaccggcgatggacgttagatgacatgtcgccgctgcgaccgggcatccacgtgtgggccatggatgcaaagcccgctatgcccgggaagacgcggctggttgaagagtttcgttctcggcaattatttctcttgcggcgtttcgcgaatccttttgcggagacgatgagacagatcttggatcctggcgtgtcggcgttgcgtagtctcctgcgctgggaaacaatcggttggaggaagtgctggggccaacaacgtggatatccgctttaatcgcaacctaagcgctggctccgcgcgcgtaactcgccacgtcatcttgacccctgcaatagtggctgatctggtcagtccgcggctcggctcgctgcggctttgaacgccgaggactgtcgccgtcaggcgcgccgcgtgcgcctccgcgcgatcacgggcgaagctggaggggctgctgccacgcgcccgcccgcctcgccgcggcctccttgttctagcccatggggccaggaacaaattctgcaaaaaccgaacgcggtgcagcagcttgtggagcgccgccttgcgctttgcgatgggccagtcgcggatgtggcccgcacagttccgcaacatgaaggcaatttagggcgcacggtggattctctccaattgtctacgcagggcgtagacaattctgcgtacaatgtctaaatgtgacttatatttaacataatgattgttatgcgcgctgttggtatgtcctgaagtgttgcgtgtgggacggcacggaggcttcaagtaccgcaacggaaaagtgcttttatggtatctttcgccgttgcgttttgttgtgggttttatgttcgttcaggtcagcgccgccgccgtgccgcgggcgctccggggggttgcgctggtcgacagcaaccacatgcccaggtactgggccgcggtctggctggtcatcgcgggtgctcaatgggcaaagtccacgcagaccatgcggctgcggtacatcgagaacctgtatgagcatgcggatcggtcattcaaggcgaatgccctggatgacgcgctatctgaccttgacgatgcccggcttgcggacattctcgagtcgtggttcgtgagtctgcgtaatcagcctgtcgccactcgcagcaatgaggaccggtggcagaccggactggcattcgtgacatcggtggtcacatggctgtcgaagtcggcggacgcgaagatgcgacagatcgaagcgcgcatccaccgactatcaactctttaccgccagcttcacattcgccaaggtgcccgcagcgagaccgttcggtcgttgccctccagtgtggtcgagagtctctatcagatcctggatccggaatcggatgccaatcccttccagcgcgcgcacacgcgctggcgggtcttcatcgcgttcgtgctgatgctgcatcagggtctgcgccgcggcgaactgttgctgctgccagcggacgccatcaagagcagctatgaccgcgaacttggccggacaaggtactggctgaacgtccggcaaaacgagtatgaagaagtcggcagcgacagccgttactcgaaacccagcatcaaaacgcgccattcggtcaggcaaattcccgtcagcgacgcaacggcgggcctggtgcagatctattgcgaaaattaccggggccggccttcccattcgttcatgttaagcgcccagactggcggccctctttccacagagtcgttgacgaagatctttacaacgatatcgaaagcgttgccagctgatgtgctgaaggaactgcacgaccgcaccgaaaagaagtcggtcacctgccatgacctccggcataccagcgccgtattgcggcttcaccagttgctggagcgaggcgactcgatgcccgaagcgctgcagaaactgcgtacattcttcggatggtcgaaagagtcggacatgccttcgcgctatgccagggctgtctttgaaagccgactcgcgagcgtatggaacgacgcgttcgatgatcgtgtggccttgctgcgcgcgctgccgcagggacgctgatcatgctagaggtcttcccttcccggcttcgtgggcaagccgggccatcggtgctcgaaagcatggtggcgtcattgccggagctaccgcccgttgtacgctactacgacgacttcgacgacaaactccgctccattccggcagtcggtcagacagatgtctttgggcttcacctcaatggtcggatgggccggctcgacttcggccggtatcctgctgtctatggcgctctgcagaagcatctactggtcttcctgctgggcgaagacgtgcatatctcgacctgcttcaatgtattgagcgcagcaatgcatctcgaggtgcatgacgtcgaccgcgttgttgcagccggcccaacccgcatagcaacgatatggatggcgctgcgcgcctgtcagttgccggttcatgcctatcgtttcgttaagacggttctgcggctgctatgcaggcatcgcctgcacgggtggtccgagtcgtatctgacctatgtcagcgccgccctgcccggccccgcgtcggactcatatgctggtgtgcggtcaggggatgtcttcctgagcgctgatgaagaagctgtgatcgttcgctacctggacgaaacatcggatctcgtgaggacccgaggctggtcaggcgtcgcgcatgacaagctttgcgaggccgcgatggtgctctgttcctatcagttcgccatgcgccccattcaggtcgcgatgctgacgaggcgtgatgtacgggtctggcagccagaacccggcggcgaaccggctgttcacctcacgttcgtcatggtcaagcaacggggacggcttcgcaaaaggccgatggtccgtcgtgtgaaacaagagtgggcggtgctgttcacggccccggtggcacatgcagacttgcacggtcgcgacgcgagcgatcgcgtcttcgacgtcagatccaatcgtgaagccggctctcgcattgcccgctgcgtggaacgcctcatcggggatgacgcttgcgcgatggaccttcgccatacggcagcccaacgccttgttgacgctggtgcaagccacgaggagctcgccgagttcatgggacattccgatgtacggaccgggctggtgtactttgcggcgtcagcctctcacgcggaacgggtcaaccgggcactcggcgcgtcagagatataccggcgggtggcaaagatcgcgcacgaccggttcatctccccggaagaactcacccagctcaagggagaacagcagatcgccggcgtgcctcacggcatcccgatcgccggcatcggcggctgcacgtcggggcaaccagcctgcccttacaacccggtgacgtcgtgctatgggtgcaggaagtttatgcctttgcacgacaaaacgatgcacgaaagtgtattggccgcaatgcgtgaagtagtctcgctcttcgagcagagttcccgtggtgatgcccgatcgccggcctacctgcaactgcagcgcacgatcgccgaaatacaggcggtcatcgaccagttggaaggcgagcgccgatgaacccacactactctgccttcatcgagttgggcaaggcactcgtccgtgaaaagagcctgcagtgggacatacctttggacagcctggcggaggatcttgaccagatcgaaattccacaggacgtcgagatcctgctcggcgaaaaagccggcacggttgcccggctcatcaagggtggcaaggccagcggtccgatcgtcgatgccttccggcgcatccagaaaacggaaggtgacgcggccgcatacgagtacctgcgtgccgaagcagacggattccatgctaccccttatgggcactgcctgaactcattcacggtcgatccgtgcgccaagcatctggaatgcttcgccgactgtcgccacctctcggccactgacctgccagagcacaggcggaatctgattcggctcgagggccagctcaagcttgccgtggaaacgatcaaggcccgcccatcgaccagcattggttggaaaaaccagctcgaccacgcggaaaagcggctcgctggggtgcaagggctgctccaaacgcagccgggcaagcgtcccttccccgatggcattgacctctccttgccccgacgacggggagtacttgatgaataaaaccaatgaagtgtcgtcggccgacgacgggaaaatgcgtgagatccttgaggtgttgctgaccgacgacgaggacatcacggcgcgcgccgtcgcccgactgcatccgtccatcagggcagcgtcgtcgatcacccgcagcgagtcacgccgcaggctgcttgccgagtatcagcagcgccaagcggaataccggcgttggcgtggccgcgctgccaagcaatctggcgctgacatggctgcgacgcttgccgacaaggacctccggattgcggagcttgaagccaccgtgcaattgctaacggcttcccacgtcgctacgctacgtgcagttggcgaactgggcggattcagcaagtgggccagattttacgagcagtatcgcgacgcccgggacaagcttgcagaactcggcgccatacccgaagcggcaatcgtcccgatgcaggagaactctaaacgccggaactaagcgcggcgaagatgaatgcctccggcgtgatactgtttgcattgatgctcgcagccacgaaatggctgcggttccgcggcggaagccgtctctctcccgaaaggagcgttcatgtcctattgccccttcttccagaccctgcatgacgaaactcgccctgtgggcaacctcggccggggaacacactactccatcctgcgggcgccggtctggcatgacgagcttctgaaccggctcgatcgctgtgcattccttgacctcgcggtcatctgggacgaggaccatgacgatcgcgtgatcgacgcgctcatgatgctctacgtcggcggcctgctctcccctgtgcggtatatcggggagcgcaagggtacgctctctgtgttgttggctccagatgcaatgcggacctggaccccgaaggcgctgcagcagtatcgcgacgatatcgagaatgtttgccagtgcctggaagatccgtggacggcaaaagttgacgccatcgatgggcgcgagcactcgatcatccacagttcggccgagaacgtctccatatatctgcgcaacatcgacgtgctgtgggaactgggggtcaaaccaaagacgcgatcgtagtcccgcgccttagtgcgcaacacgcaacaccgcagtcgtcagactcccggcctggcgtgtccttccgttgcgcctccacacaaaactcaacgcaacgaagacgggtgccacgggcacgcaacacatgccagccaaaaaagtgggcgccctgtggatcactcggccgtcttccgcctgagatacaacaaaaacggaacacccgaaccaacgcaacgctaggccgtaggtgccaagaatgcgcgctgagccgtataagtcactttagcctagaggccggcgatacattgggatcaattgggctataattaggtatcaactgatcgaccaggtgccgccatgctagtcgtctcgcccgagaatatcagcgccgtgatggcgctgtcgccgccccggctatcgatcgcagaactggacgcggctgtgcgcgaaggcctccccaagtccgcgctgcgcgagatcgtcgaccacgtcgtacgcacttccgaggagcgccgtgcattgatgtcccgcatcgtgccagaggccactttcaaacgccgcagggatcgactcaccccggacgaatcggaaaagaccgagcggctggcgcggatctttgccaccgcgaacttcgtctgggacgatgaggacgacgcgcgggcgtttctcaatgccgcccatccgctgctcggcggcagtaagccgttggacgtggccatgacggagctcggcgccaggcgcgttgaggaactgttgtggcggctcttctacggcatgtccgcctgatgcggatctttcggattgcggaccgtcggcacgaggtctggaacggcacgggcgccatgctggtcggcgggcgcttcaacagccccgggcggccagtgatctatggcgccttgagcttcgctggcgcaatgcttgaggtgctggtgcatgcccgaatcggcaaggtcccgcgccatcacgtcttggtgatcggctcggtgcctgaagacgtgtcggtcgaacgagtcgatgtcggccagctgccaaccggctgggacacgcaggaagacccccgtgccgccagaagctttggtgatcgctggctggccgagggccgctccgcagtcctgctggtgccgtccgtggtagctcgcggggaatggaacgctctggtcaatcccacgcatcctgacgccccacggatccaagtttccgcgccggagcctgtgcaatgggatgacaggctttttacgcctcattcgttgtaacgaggccgtacgcgcggcggcaataggcccccagctggcgcttgcgagatagctgattttcgtttcggtcgcggttgccgcggccatcatggcgacgcaaccttctgccgtaatgaacaataccgcggatggcggtaaggtccaacactccctgagctgagcgcggcgtacccttgactttgccggtgtgtcggtaatctggaagcatcatcgtgaataccgcttcccatgcttaccccaccctcgcaactgtccctgttcccgaccccgtcgaatcgggccgccctcacccatgcgctggcgctgttgccgctcgcctgttccggcacgaagttggaccgcccgatgcgagctgcgctggctcgccgttatggcgtggtcccgcagttgctgcaggagactgagggcggcatcggcatgcggcggtcccagttcggcgccttcctggatggcctagcgccggcattcggcgacaggatcggccaacatccaaacggcacaccgctctatcgccggtatggcgggatcgaggccggcgccatcgccagcctgacctatcgggcagcgccctacctgcctgcacgcagggcgcgcgtgctgtcgctcttcaatggtccgagcggtccgacagccgacgtcgaggtcgaagaggtcatacgcggtcgcacaaaaatttgcgcgcgctgggtcagcgtcgcggatcttcatccttttccggtcgaggtgccggcatgagcgttttcgatcggctgctgcaacaagaggcgaacgaactgtgccaaacgggagcgggaacgcccgggaagctcatagcactgactcatgcaggattccgggcctgggccaatctgacttttccgcccgagaagcgatttgcgcttctgcaagaaattctgcgctactgtgcctcgcaatgtttgctggcctgctgcttcacgcaggaataccgcttgcaggagatcgcgcccagacatgaccatgccgccgcatcccaagacgcaggccatcacccaccatgtgcccgagcatctgatcgaggccttgctgcaggcgactgacgaatttttcagcgccgcgcgtggtggccagacccgcgggcagcgcgccgtggaagtccgcgcgcaggatcgccacgcgggactggattccccggttcagcgctcggttctagagcttgtcagctactcgacccactccgcatccacttcccgtagcaagtgtctagccaggatgtagtctcccattgtcgctgcctttgcctccaatctgtccaactcacctgctggcagttcgtcgaactcaaactggcagtaaagatttcgctgccggaacgttgtctttggtcgcaataggccggcaacgagcgcagccggcgagcggacggcaatgctttcgtgcccgcgatactcgacgcgtaccccaaccttgtcgccgagcctgccgagttcaactgcatcttgccaacctaactcgtagtccaactcgaccaccgttactccctctgcttccaggagcttcagtgcctcccctctggttccagctcgagctgtcgccattctgtcctccgctgcatccctcggcggccccgtgtattagcccgccgcaaacagggcgtgtggctattcgtgcgcttcttcagccctggtcctgtattgcacagcaacattgtaagtggggggcagcttcgtttgctggatgcggtccttcgagcggataggaatccttgcatactgctgggaaaaccctagtttctaagggcgggcacggcggtcagccagaacagctggttggttgtgtaggagaagccggccgagtgcgggcaggctgaccgccaccacgctccagacttgccagatggcaaaggccaggaaaagcgccggcacggaaatccagaggattgatcttggctatcgcctcgccttctctttcccagaacgctttatcctcaggagtccagatgtaaagcgtggatccacgacgagctgacagatcgtcattgcgcatcggcatcggctctccagtgcgatttcgagaggcggcaagctagaatccagcgaaacatagcctcaatgactaagaggggaaatgtgaagttgtccagatgattcgcatttccaagtcttgtgcttcaaatgtatgcatggcggctttcaagtgatgtaaaagctttcttggacgttatgaaatatttggggcgccttcatcgcccgcatgtgacctatgccgccgtggcaagcgcacacggataagtccacgtacccgccgaggaggtcctggcctgatccggacggcaagtgcctggcgccatcatgtatggtctgcttccaggcatcgatttcctcaatgtatcgactcctgtctggacgctttcgcctccccctcgagctgcttgcgcagcgccgcgaagcgctcctgtatattttctccaaacagcggatctgggctgtctggaacggtggtcgcgacttctgcccagtcctcttcggtcagctgctgcgcagcgcgcggcatgacgtgtctctcctcagtggagagatgattgcgatagtacacaagatacatggccgcggcggcctccagggccgcgcgcgaagtgatgacatctcgctccgcttcattcagacggcttaggagctcttcgcgcaccctggcaattatgcgatgctcttgcaggagccggctgaccacaatctgcatgccgggatctcgctcgacgagcagtgcgtacgcaacatcctcgcgaggatggtgaacacgatcaccaaagttccgcatgtaatagatgatcgtgccgatcaaactgtagttcggctgctctccccggtgaaaaacgctcacctgctcttccagcaggtcgagcagtgcggcgaaattgatgtgatcggcatgccaaatggcaagttggtcggtcatggcgcgctccagcgaaactggtcaagtacacgatcgggctcgaagctgtatcgaactcaagaggctctaatctgaacagtagtctcccgttaccatttggggctgatttagatcaatagtgggcgtcgcccactctcccacacgcctgtgtcggcacaatgggccctgctcgaaccccggcatgacgctcttgcgcttctgggctgccatggaagggcgcctcccagttgccccagcacgatgcgcacgatgcgctcgacatgcgcgccggtcagctcgatgcgggcgccggccagtggtcactacttggtcacgatccttcgatgttgccatggcggccaccgcttgcgaggcgggtgcgatgccttctggtgggagatgctggcccagtggcgcaagactgggctgagcatccgcgccttctgtcaccagcatggcctggtggtcagcattgttggcccatggcgcaagcgcgtggaccacgaccggccgggttgccgctgacggtgaccgccgacaccgccttcattgcggcagccacgagcacagctgagatggtgatcacctgttgcacggacccatagtacagtcatcccggcgtcattagaattagcagcaaatagccttgatttctcaacggtatggcctacctcgtcaatttgaatgtcatgcgacatcccagaatcccgtattgtcgagctatgaagcgcaagtgagtaggcccagattacgctcgaagatccgctgcccgtgcgtgaactcctgctgcgggcccgccgcaaaaaggctcatgttcggtcgtgctaccgcttcgcagatcgcctcagcatcggccgcatcgttccttttggtcttaacgtacggtttgacgaattgcggcgccagcatgggtgaggcatatcaaatctgcatcttactcaagatgcgatgtccttgcgaccagtaatatctatgtatgattttcagcggttggcattatgcttgcggtggcagtacagactgtttgcaatggcattatcggctctgtggcacacgttcataacgtcgaggttctcttgtgtttcgcacaagtagtttcgattgttgacgacgatgaggctatgcgcatcgcaacggcgagtcttgtacgctcgttcggaaaacctacacgccaatttgcgtcggcggaggagttcttgcaatcgggccatatcgccgagacatcgtgcctgacgtcatgatgcccggcatctcggggctcgccatgcacgaccgcattctggcacttggctatgcgccgccgaccatattcatcacggcattcccgtcggccgacctccaagcgaatgcccttgccaaaggcgcgctggctgtcctcaaaaagccggtagatgctaacaccttggcgtattggctcagtgtcgctttgtgcccgccgtagcggatcgacgatatgttggacagcgcgagcgcaagactgcgctgccgaggctggcatcgagttgattgatggcgactgccagacgccgactcgtgcggcttgcggcgcaaaaatggcgccacgaaagcggaaggaaagtccgttctggggctattgcaacccccgagttgcctgacgacacttgcctgtgcggcgctatccggaaatgattggtcgatgaggaaggaaaggacatctgcgaatcgatgtccttccgctctactgaaagcccggacaaccgatcttcaccaagtcggcggcgaccggaacgaccggtccctgctactcagcaaacaggtcgggaccaaacacttcgtaatgaatgcgtgcctcatgaatgccgagattcttcagggcatcatgctgcattcgcatgaacggaatcggaccgcagatgtagtagtcggcgtctggcagcaggatcgatttctcgatctgcttcacatcgactaagcccggataatcatagtcccgtccctggacatcttccggtagcggttggtcatagaaaacaaagaggtcaaggttttcataggtcttcgccgcttcgcgcagcctgtcgcgcatcgcgtgtactgcgctgttacgtgcgccatgcacgaatacaacttgcctcggtggggcctgcaatgccactttgagcatgctgaccatcggtgtcagcccaacgccaccgctgatcaggacaatgggtgtcttggcgtcaacgtcgatatggaagcttccatagggcgcagccagcttgacctgatccccaacattcacgtgatcatgcaacaggttcgaaacatagcccggaggctgcggcccgccgccctcgcgcttcaccgagatgcgatagctgcgcccgttcggcatatccgacaggctgtattggcgaatctgctgcaacccgagcgcgggcacatcgattgcgacgctggtgtattgtccgggttcgaagttcaccacgggaccaccatcggcaggctcaaggatgaatgacgtgatcacatcgctctcggggcgcttctcacgaatcacaaaggtgcgccaccccttccagccaccgggttgttccgcagagcgctcatacaactcgctctccatgcccatcaggacatcggccagattcccgtaggcttgcgcccaagcggaaatgatgtcgtcggttgcggcattgcccaacacttccttgatggcggccagtaggtgttctccaacaatggggtactgttccggtttgacgccgagacttgcatgcttgttggcgatgttcttcaggacggccatcagactgtttgggtcctcgatattctccgcataggcatagaccgcccgtgccagcgcctgctgctgctggccctgttcctggtgggccatgttgaacacattcttcagttcgggatgcgcttcgaacatgcgctgatagaagcacttgatgatgtcgtagccgtgttcggccagcaccggtgcggtggcctttacgatgtcttttgttttctgggtcagcatagtcggtctccatggcgcgggcgtaggggtcgccaaatcggcgagggtagacggtggcctgcctcgccgcgttgatcaaggtcaagtctaggtgagacggtcgtgacggagtaacccgaagccgtgccgcaaggcttgaacgatgacactcatggcagaaattgaacgggccatgccaagatacggcgaatccgctatcacaaggtctatcgcccctgactgatccgctattgaagctgggataagcggcggcgcaaccccgacggcgctatcctacgcgaaaaaactccacgctctgtcccgcattgacccgtcgtgcgcctgccgcgcctcggccagttgcgccgagatcgccgcgacctcttcgcgcgcggccgcggtctcggcgcgtgccgcgtcgcgctcggcctcggcggcgctggccgcatggcgggcctcggcgcgcaagcgtggccagctcgccggtggccgctgatcacgttccacgtcatcgccaggcgcgtgcagcgcttgccggcggcgatatggcggcgcaggttttccgcgtccagcgggtggcgcacgtagcgcacggtggccttgctctcggcgccggactgcagctcgatctcctggtcgacggtgaagccggacggtgcggcatcgccggccagccattgcatggccgccaccggcgactggttgacgtgcaggttgcctggcgccccccggtcactttaggttattttccccagtacagtccaaaaaagaaaacacccgcatcgtttgacggtgcgggcgaagtttccattccggaaacgggtagacaagtcatgaagagcgcccccgcatctccatgacaggagcaatcttatcgggcagcacccagccgcggcttgaccaaagtcaagtgcgcagcagactgcggcagcttaactgccctggtgcgcaagtacgtcggccatctcgtcggcgtgctcctcttccaccgccaagatctcttccatcgtgcggcgcgaggtcgggtcgcctcgtccaggaagtggacgatttcgcgatagctgtcgatggcaatgcgttcggcgatctggtcgggatgggcttgttcctcgttggaatgggccaggaattcatcggccacgctcttcgagctcaagccgtcgtcatttctgcccccgttcaagtctgccggcatacgggccgccgtcgcttctacatctcattgagttcaactcaatgctgcttttgtcacttttcccaataactgagacggccaattgcgaaacatttgagatacatcaataggtgatatatgaggtggccacatgctgtgcttggcaaaggcggctcgatacatggttttaccagtcgtattgaacagcatgctgcgagcagctaacatgttcatcctgggcgcgatgacacaagtgcccaccagccagacctttgcgtccgagagcaaagaagcggcctgtacaagctatgccagctgtcacgaacggtaatgaagtcccgtagcactattagaccaatagcttaggagacgactgtgctgagtcagcatgagtttgccacgctcgtgctggtaagcgacaactctgacccaacggagctggaccgcgcggatgtggaggcgctgctcacgcatcagctggttgggcttcagagctttgggcccaaccacagccgccctggagtcacaatcgaagactatgcttttctccaagccgtcgggcgtgttcgcgcaagggattgttggccacgccaggcctcgcagtgcgcgcattgctttaacccgtagagactgccggcgtttccactctcacgggcttccctagcagcaaggaccgcgaggttcgcaatgctgcaatctttattcactcgaagtccgctccactgggctctcatcgaatagttcaggggcgggccgcacttaggagatgcaagatgactcagtggacagcagagcaatgcaccaaggcacagatggcgggccttgaagccatggccggactaaccaacaaggtcttggaagggttcgaaaaagtaatggatttgaacctccaaacaatgaaaatgaccctggcgcataaccgggagggcgtaatgaaagccctctcagtccagaacccgcaagaactcatcgaattgcaaatcgaattatttcaacctgcagccgacaaagttttggagtatcggcgtcaactgcacgacatccttgctgctacgcgggcggagttcgagaagatcgccgaagtccaatacacaacaagcaagggccagctgcagggtctcatagatagcgcggtgagcaacgccccatccggctcgacggctccgctggccgcctggcaggaggccgtaaaggcgaccactgcgctctatgagtcgatgcagtcgacggcaaagcaggccgtggaagtagccgagaacagtttcaatacggctgcggcggcggcctcgaaaggcgcgcggcatcgtgcagcgctggcgtctccggcagctgcaaagtagtccggcagcgctgggcccgcctcatccatgcggttataccaagacataggggattggagacatgaccaaaaagcttgccgttgtcacgggtggtatgggcggtttgggcgaggccatcagcatctggctccagggcactggttatttggtggctgtcacccgttctcccggcaacagcggtgtcgcagactggctcggctcgggcggatggaggagcaagaccgaaattccacttacccccgtaccgagattgatgccggccaggaggccatgctgacgctgtcgatctacaaaggtggtattgccgtcaatcgcgatgccgagtggttcgcggacgagtccatctcgtacaagacgctcggcgagatctgcctggcccagccaggcggcgtgggcttccagatctgtgagcagaagatcatggcccagtcggcgccgcagcccacgtcgaacaatctcgaggaagcctatcgtcgaggcccggtacgcaaggcagacgagctggtgtcgctcggcaagtctgtcggcctcgacggcgagcgcctgcagcagatcgttcagcgctacaacagtgacgtggccaacggccgcgacagcgtgttcgggcgcagcggcctttggcgtcgctggggcaagctcatcgccatcgacaccgcgcccttctacatctatccgtgcatcacagcgatcctggcgacctactgcggcctgaaggtggatgcagacatgcgcgtcatcgacatccagggtgcgcagattccgcgactgcatgccgcaggcgaagtcgtcggcggcttccacggctcgggctacatgagcggttcgtcgctgtccgagtccgtcatcttcggccgcgtcgcggctcgcactgtgctggagggagcatgaagccaacggttctgctcatcctggcgcatccggacaagcgcggcttcggcggcgcgctggctgaggcctacgtcaagccactgcaagcccaaggctgtgatgtcgaagtcctacacctgccggccatggagttcgacgccaccccggccggccgccccccggaactcgaagcggatcttgtgcgtgcgcgcgctgcgatccagcgcgccgtcacatcgcactcatttaccctacctggttcggggcgatgccagcccggctcaaagggttcttcgagcgcgtcttcggcaacgacttcgccttcaagttcaagccgaaatcgctgttcccggagtcgttcctgactggccgctctgcggacattctcgtcaccatggacacgccaccatggatctaccggttcctgctgggtgcgcctggccacaggctcatccgccacgctatcctcggcccttccggcatccgccccatcaagatcatgactttcggtcccctgcgcgcatccagcgatggccagcgacaaaggtggctggcccgagcccaggcccgcgccacgtcgatcgccaagcggctcaacgcaggggcccgtacgacgcctgcctgagacacccgctggacgttgtttgaagtaatgctcgctcgccgccatcaaccgtccggcttcaactgggacgcgcggtcgcaaggcccgatatcgttcgcaccgcttcacttgtgctgccgcgcagcataggcaggtcgaccagccaaattagtgtgaatttcagcaagggccgatattctagatttcccatgcctgcgttggctcttgattcgggcgacaaaaaagcctaaggtggttttcggtgcgcgctcccagcgctactcgccccgatgcacccactgccgtcgccatcgtcctccgtggaactcgagccacggagcagcagtcgtagttcctttgtccacccacgacaaaggaggccgacatgctaagtccgcatgaaatcgccgcgctactgctgcttgacgatgcgcaggagatccacgacctcgaacccgagcatttggacagcttgctggtccacaaactggtcacgttggagcatggtcatgataccggcaatgcctacccccgcctgacaagtcaggggcattccatgctcgacgccgtgcgccgcatccggtaacagtcggctcgtgcgggagagcaaacttcacgcgtaatcgcggctcagggctgatatgaccgttgtcaatcgagatcggtttgtttcagtttctcagttgcatgttgtcctaaattgcaacgtagccgtaaatctcgacggtggattacgctgatatccgcggattggctaccgcattacagaggtccaatgagcctgccgctatctaaagccgcgagtcggatgaaatccgttgcgtagccctgtcgcgggctactcgggtgccgggctacgccgccttcaggaaactgcctccaaggtatgtgtcaaatatgtcgatactgcagcgctcagttacgttgcccgcgcctcgtgtggtacggcgagcgacatcgcgagccggctgatgtcccagatgaacccgctcagttcgcgggccactgcgaccaccgccatgttcgggatctttccgcgcgcagcgagcttccgatagcgccggcacagtagaacctgggcgtcccaggcacggtcaaggatagctttggggatgcgttcgtgcctgcgctggatctcgggactgacgcgtgcaggtaccggtaactccgggctgcctcgaccagcagctttctggcatagctgttgccgttcttggtgatgctgccctgacgccgtttgtcgcccgatgagtgctcggagggcgtcacgccgagccaagccatgagctggcgcggatgcgcgaagcgcgagagatcggcgatcggcgcgttcatgttggcataatgcacgtgccgcgggcgtcgcaggcctcctcgatagagcccatccctgcatgctggggcgtggaacacaagcgcgaggcgcgtgcgccggcactcacggccgggtcttgacgactttaccggacttgctggaggggacagataaagagcacccaactgttccgcatcgcacaacgacgcagcctccggccggtcgcccgccagatccgccaagtgctgcatcgagtgctgtcttgacaccttgtcgccggcttcctttaatgggttacgtgtatcaaggtgctttatctgacaggttcggccgaatacctcaagccatgatggaatccggggaagtccacgatccgcagcgcaagaaggaagaactgcgcagcttcctgttcctcaccgccgtgatggtgccggtgctgtcggtcatcgtcgttgccggctacgggttcattgtctggatgagccaactggtgggcggcccgccctcgcactgacaggcgcccgccaggcggcggcgtcaccggtaacaagcaaaagaaggtgaagcggcatttagctggaggttccgcatgccgactgcgaagcgtgccatccccatacagccactcccatgcggcgaggagtggcatatcgccggcatcgtggtgcacacccttcccgacagcctgccccaggtgcgagcggccattgaggccataaccggcgccgagatccacgcggtcagcgacgacggcaagctggtcgtcaccgtcgaggcgcccacgtcgcgcgccattgccgcacacctcacctgcctccaccagttggagggcgtgctctccgccgcgctggtctaccagcacaacgaagacgccgcagcgatgaacgaggagatggccgatgaagatctctcgtcgtgatttcatcaagcagaccgcgatcacggctaccgcatccgtggcaggcgtgaccctgccagcgggggccgccaactttgtcacagacagcgaggtgaccaagctgaagtggtcaaaggcgccatgccggttctgcggcacaggctgcggcgtcaccgtcgccgtcaaggacaacaaggtggtggccacgcaaggcgatccgcaggccgaggtcaacaagggcctgaactgcgtcaagggctacttcctgtccaagatcatgtacgggcaggaccggctcaccaggccgctcatgcgcatgaagaacggcaagtacgacaagaacggcgatttcgcgccggtcacctgggaccaggcgttcgacgagatggagcgccagttcaagcgcgtgctgaaggaaaagggtccgaccgcggtcggcatgttcggctccggccagtggacggtatgggaaggctacgcggccgccaagctctacaaggcaggcttccgctccaacaacatcgaccccaatgcgcggcattgcatggcatcggccgcggccggcttcatgcgcaccttcggcatggacgagccgatgggctgctatgacgacttcgaggccgccgatgccttcgtgctgtggggctcgaacatggcagagatgcacccgatcctgtggacccgcgtcaccgaccgccggctgagccaccccaagacccgcgtggtggtgctctccaccttcacgcaccggtgcttcgacctggccgacattggcatcatcttcaagccgcagactgacctggcgatgctcaactacatcgccaactacatcatccgcaacaacaaggtcaacaaggacttcgtcaacaagcacaccgtcttcaaagagggcgtgaccgacatcggctacggcctgcgcccggaccatccgctgcagaaggcggccaagaatgcctccgaccccggcgcggccaaagtcatcaccttcgacgaattcgcgaaattcgtctcgaagtatgacgccgactacgtcagcaagctgtcggccgtgcccaaggccaagctcgaccagctcgccgaactgtacgccgaccccaacatcaaggtcatgtcgctgtggaccatgggcttcaaccagcacacgcgcggaacgtgggccaacaacatggtctacaacctgcacttgctgaccggcaagatcgccacgccgggcaacagcccgttctcactgacggggcaaccctccgcctgcggcaccgcgcgcgaggtcggcaccttctcgcaccggctgccggcggacatggtggtcaccaacccaaagcatcgcgaagaggccgagcgcatctggaagctgccgcctggcaccatccccgacaagcccggctacgacgccgtgctgcagaaccgcatgctcaaggacggcaagctcaacgcctactgggtgcaggtcaataacaacatgcaggccgccgccaacctgatggaggaagggctgccgggctaccggaatcccgccaacttcatcgtagtgtcggacgcctaccccaccgtgaccgcgctggccgccgacctggtcctgcccagcgcgatgtgggtcgagaaggaaggcgcctacggcaacgccgaacgccgcacgcagttctggcaccagctggtcgatgctccgggcgaggcgcgctcggacctgtggcagctggtggagttcgccaagcgcttcaaggtggaagaggtctggccgcccgagctgatcgccaaaaagccggagtacaagggcaagaccttgtatgacgtgctctaccgcaacggccaggtcgacaagttcccgctcaaggacgtcaacgccgaataccacaatgccgaggccaaggccttcggcttctatctccagaagggcctgttcgaggaatacgccaccttcggccgcggtcacggccatgacctggcgccgttcgacgcctaccacgaggcgcgcggcctgcgctggcccgtggtcaacggcaaggagacccgctggcgctaccgcgaaggcagcgacccatacgtcaaggccggcaccggcttccagttctacggcaaccccgacggcaaggcggtgatcttcgccctgccctacgagccgccggccgaatcgcccgacaaggaatacccgtactggctagtcaccggccgcgtgctggagcactggcactccggatcgatgacgcggcgcgtgccggagctttaccgttccttccccaatgcggtggtgttcatgcacccggaagacgcgaaagcgttggggctgcgccgtggcgtggaggtcgaggtggtgtcgcggcgcggccgcatgcgctcccgcatcgagacacgcgggcgcgacgcgccgccgcgcgggctggtgttcgtgccgtggttcgacgccagccagctgatcaacaaggtaacgctggacgctacctgcccgatctcgctgcagaccgacttcaagaagtgcgcggtcaagatcgtgaaggtatagcgtcggtcgagaccaagaacagggagacgccatgaagccaagccgatcctgggcaagcctgctggccgtctgcgcggtgctgctggccgcgctggccatgcaggcgatctttttccccgcgcccgcgcgcgcgcagggcctggtggatgccatgcgcggccccaccgccatcgccaacgagccgcgcgccccgctgctctaccccacagagaacaaggacatccgccgcacgcgcaactacaccatgcagccgccgacgatcccgcacaagatcgacggctaccagctggacaaggacttcaaccgctgcatgttctgccacgcgcgcacccgcaccgaagagacccaggcgatcccggtcagcatcacgcactacatggatcgcgacaacaacgtgctggccgatgtttcgccgcggcgctatttctgcacccaatgccacgtaccgcaggccgatactaagccgctgatcggcaacaacttcgtcgacgtggacaccatcctcaagcgcaggcccggcgccaagggcgccgccaaataaaacgaacaaagtgggtacgccatgctcgacctgatcaagcgctactggcggacgatcaaccggcccagcgcctatttcagcctgggtttcctgaccctgggcggcttcattgccggcgtgatgttctggggcgcgttcaacacggcgctggagctgaccaacaccgagcagttctgcaccggctgccacgagatgcgtgataacgtctaccaggagctgcagggcaccatccacttcaccaaccgcagcggcgtgcgcgccaagtgctcggactgccatgtgccgcacaactggaccaccaagatggcgcgcaagatgcaggcatccaaggaggtctggggcaaggtcttcggcaccatcgacacccgtgaaaagttccaggcgcaccggctcacgctggcccagcacgagtgggcccgcttcaaggccaacgactcgctggaatgccgcaactgccacgactaccagtcgatggacttcacgcggcagagcccgcgcgcacaggccatgcactcgacttatctagccaacaaggaaaagacctgcatcgactgccacaagggcatcgcccaccatcttcccgacgtgtccaaggccggggagaaatgacacgtgccagcccgctcgcccgagccgttgcctgatcattcgtcggtctgctcgcccggctgcgcagaccttcccatccttgccgccagcgggctcggcttctcccgtgcgggacgggtcgtgttcagcggcatcgatctcgctctcggccccggcgatctactccaggtgctgggcgccaacggcagcggcaagaccagcctgctgcgcgtactgagcggcctagtggctccggacgagggcgaactgcactggcgcggacggccggttcgcgccggcaacccgtccttgctgcaggcgctggcctatgtcggccacgccaacggcatcgatcccgaactgagtcccgtggagaacctgcgcttcgccgcacgcctggcgggcgtcgccgccacacccgacaacgtgcaggccgcgctggccgcgttcgggctggagcgcgtcatgcatgcgccggcgcggtcgctgtcgcaaggcctgcgccggcgcgcggcgctggcgcggctggcgctggcgcggcgcgaactgtggctgctggacgagccggtgacgtcgctcgacgccgacgccgctgcgcgcttccaggcacagctcgacgatcacctgcgcgcgggcggcatggccatcgtcgccacgcacgcgctgctgccgggcgccaggaccttaaggctggacgcccggtcatgacccgcaccctggccgccatcatcatgcacgacctgtcgctttcgtggcgacggcgcggcagcctgctcggcagcgtggtgttcttcgtgatcgccaccagcctgttcccgctggccgtcgggcccgacctgcagcagctgcgcgcccttgcgcccggcatcctgtgggtggcagcgctgctggcatcgatgctgtcgctgtcgcggctcttctcgcaggagtacgccgacggcagtctcgatcagctgctgctgtcgccgcatccgctggcgctgctggtgctggccaagatctgtgcgcactggctgaccagcgggctgccgctgctgctgttgacgccattgctcgcccagcaatacagcctgccggcaggttcttcgtttctgcttgcagcgtcgctgctggtgggcacgccggcgctcagcctgatcggcgcggtcggcgccgcgctcacgctgggcgtgcgcggcggtaccgtcctgctctgcattctggtgctgcccctgtgcgtgccggtgctggtattcggcgccagcgccggcgccggcgccgacgccgggctcgaggtgctgccgcagttctcgctgctcggcgcctgcctggccttgtcattgttcctgtgcccgctggccaccgccgccgggctgcgcaccgccatggagtcgtccggatgagccccccgctcaacccagcgcatggcggcaacgctgcgccacctgcgctgcgctcccgctggctggcctacgccgcgccagtccgcttctatccgctggcgggacggctggcgccgtggtgcttcgcggctgccgccatcttcctgctcactgggctctacgtcggctttgccgtctcgcccacagacgcgcagcagggcgaggtctatcgcatcatcttcatccacgtgccggcggcgtggatgtcaatgttcatctacctcgtcatggccggctactgcgcgctggcgctggtgctgcgcacgcggctgtcgtcgatgatggcctcggcgctggcgcccacgggcgctctcttcaccgcgctcgcgctgtggacgggcgccctgtggggccagccgacctggggcacatggtgggtgtgggacgcgcgcctcacgtcggagctgatgctgctgttcctctacctcggtttcatcgcgctggaggccgccatcgacgagccgcgccgagccgaacgcgcctgcgcggtgctggcactggtgggcgtggtcaatatccccgtcatctacttctcggtgcagtggtggaacacgctgcaccagggcgcttcagtcagcctcaccgcggcgccgtcgatggccgccaccatgctcgccggcatgctgctgatgacgctggcctgctggatgtacaccatcgccgtcgcgctggtgcgcgtacgctgcatcctgcgcgagcgcggcgaggtgtccgatgccggccacgcgccggcgaatccccgggagaccacaacatgaactggtccgcactgtcatcctttactggccatgcagcatatatcgtgggcgccttcggcatggctttcgccctgctcgccatcgaactgttcttgcttgcgcggcgcgcccgtgccggcgcaggtcctcgccgatgacaccacgcaggcgccgcctgggtctgttgctcgccgcgctgatctgcgtcggcatcgccacgacgctggtgctcaatgcgttccgctccaacctggtgttcttcttcagcccaagccaggtcgcggcgcacgaggcgccggtggcgcgcagcttccgcctgggcgggctggtggcgcccgggtcgatccggcgcgagggcgacggcatgaccatccgcttcatcgtcaccgataccgcgcggcaggtgctggtggtctatcgcggcctgctgcccgacctgttccgcgagggcaaaggcgtggtggcgcgcggcaagctggaagcggacggcactttcgtcgccagcgaggtgctggccaagcatgatgagaactacatgccgcccgaggccgccgacgcgctgaagcaggccgagcaggtcaaccgccgcatggccgggaccccgcaaggagcgcggcaatgaatgccgaactcggccatttcgcgctgatcgtggccctgctggtcgcgatagtgcaggccgcattgccgctggccggcgccgcgcacggcaacatcgcgtggatggccgtggcccgtcccgccgcgcgcgtgcagtgcgtgctggtggcgctggccttcggctcgctgacatgggccttcgtcagcaatgacttcagcgtgcgctacgtggcggcgaatgccaacaccgccctgccgctgacctaccgcattgcggccgtatggggcgggcacgaaggttcgatgctgctgtggacgctgatgctcgggctgtggtcgacggcagtttccttctgcagccggcagcggccactcgccgtcgtggcgcgtgtgctgggtgtgatgggcaccatcagcgccggcttcctgctgttcctgctgttcgcgtccaatccgttcctccgcctgctgccgcccgcgatggaaggccgcgacctcaacccgctgctgcaggacccgggcatggtgtttcatccgccgctactctatatgggctatgtcggcttctcggtcaccttcgccttcgccgtggccgcgctgctggcaggccgggccgacgccgcttgggcacgctggtcgcgcccgtggaccacggtggcgtgggcactgctgacgctgggcatcatgctcggcagtgcctgggcgtactacgaactcggctggggcggctggtggttctgggatccggtcgagaacgcctccttcatgccctggctcgcgggcaccgcgctgatgcactcgctcgcggtcacagagaaacgcggcgcgttccgcgcctggacggtgctgctcgccatctttaccttctcgctgagcctgctcggcactttcctggtccgctccggcgtgctcacctcggtgcacgcgtttgcggtcgacccgaagcgcggcatcttcatcctggcgctgctgggactggtcaccggactgtcgctgacgctctatggatggcgcgcgccgcggcttgcacggcgcgtcgaattttccgtggcagcgcgggaatccctgctgctcgccaacaatgtgctgctggccgtcgccgctgccaccgtgttgctcggcacgctctacccattgctgctggacgtgctcgggctgggcaagatctcggtcggcccggcgtacttcgagcaggtattcgtgccgctgatggcgcccgccgtgctgctgatgggcgccgcgccgctggcgcgctggcggcacggcggcctgcccgacatggcgcgacggctgcgctgggcggcggcggccagcatcgtcgtcggactcggcctgttgctggttcagcgcaacgcgtcggcgctcgcagggctggggctggtgctggcggcctggtgcgggctcagcgccgtggccagcctgtctacgcgcctgcggaaccagcaaggccggcgcctggccgccttgcgccagctgcccgcgagctattggggcatgctgctgtcgcacgcgggcgtgggcgtcttcatcgccggcgtgacgctggtgtcgagccaggagagcctgcgcgaactgcccatgcgcgtgggccacaacatcagcgttggcggctatagcttccgcttcgacggcgtgacgcaggcggcgggccccaactacgatgcgctgcgcggaacgctgtccgtgtcccgccacggcaagatcgtcgccgtcctcgccccggaacgccgcatctaccgcagccaggacatgcccaccaccgaagccgccatcgacagcggcctgacccgcgatctctacgtcgcgctgggcgagggcgtgggcgatggcggctgggcggtgcgcatccacgtcaagccgttcgtcgactggatctgggccgggtgcatcctgatggcgctgggcggcttgcttgccgtctgcgacaaacgctaccgcctgcgtcggcgcgccccggctccacaggccgaaacagtcgatgcgccgaaggcaccggcactggcgctttccaccgccgaggagacgcgggcatgacgcgcttcctgctgccgctcgcggctttcctcgcactgaccatcgccctggcggccgggctgcggcacgatccgcgcgaactgccctcgccgctggtcggtaagcccgcgccggcgttcagcctgccgctgctcgaacccgaaggacgcacgctcgcggcggccgacatgcgaggcaaggtctggctgctgaacgtgtgggcatcgtggtgcgccgcctgccgcaccgaacatccggtgctggttgacttcgccgcccgttcgcacgtgccgctgtacgggctgaattacaaggacgaaaccggcgcggcccgcgactggctgcagcgcatgggcaacccgtacgccgcgtcgctggtcgatgcggatgggcgagtgggcatcgattacggcgtatacggcgtacctgagacctttgtcatcgaccagtccggcgtggtgcgctaccgtcaggccggcccggtcacgcgcgaggtgctggagcgcaagctgatgccactcatcgagcagctcgagaaaagcggggacggccatgcgtaggcgattcggctcattgctgagcgccgtgatctgcggccttgcgttgcacgccggcgccgccacgctctcggacacggaactcgatgcgcgcgtccacgccttgtccggccagctgcgctgcctggtctgccaaaaccagaccttggccgactccaacgccgacctcgccgtcgacctgcgccggcagatccgcgagcggctgcgcggcggcgccagcgatgaagccgtgaaggactacttggtgcagcgctatggcgacttcgtgctctacaagccgccgctcaggccgctgacctggctgctgtggttcggtcccttgctgttggtggccggcgtgacaatcgccatcattcgcgcgcgctcgcgcagcgtcgcagccgggctaccgctcgacgccgaggcgcaacgacagctcgcagcattgctggacgagacgtccgggcaacctgccagtccgccagcggaggcacgacagccatgacgaccttctggctcctagccgccgcgctgatcgccgccaccatggcttgcctcctctggccgctgctgcgccaccgtgtcgcgccagatcccgacacgccggagcgcgccctgctggcagacctgtaccgcgagcaactgaatgagctggataccgacctgcaaagcggcacgctgaccgccgcgcggcacgcgggggcgcgcgacgaactcgcccgccgcttgctggacgagaacgccagcgccacggccgccgcacgacaggcaaagccttcgcccctgctcgccgccgcgctgctggccgtcctgcccagcgctgccatcctgctctacctgcacctgggcaatcccgtcgcgcaatggagcgccaatgacatgccggcggcgaccgacggccagcaccagctcagcggtttgcagctcgaaggcatggtcaaccagctggcaaagcgcctgcgcgatgcgcccggcgacgccgaaggctgggcgatgctggcgcgctcctacagcgtgatggagcgccacgacgatgccgccgcggcctatgcgaaagccattgcgctggcgcccgacgtcgcgccgctgcgttcggattacgcggacgtgctggcaagcctcaacggcggctcgctggaaggcgcgccgatggagcagatcggccgcgcgctggcactggatcccgatgatcccaaggggctggcgctcgccgccagcgctgcggcggaacgcggagacacgcagggtgcgatcggctactgggaacacctgtaccggctgctgcctgcggattcgcagacggcggcgagaattgcggcaaatcttgcggcggcgcgagggactgcggccacctcgcttacggccagcggcgaaatcggcggcattgtgacactcggcgagatggcgggcaggattcctcggcctgacgaaaccgtcttcatctatgcgcgcgccgtggatggcccgcgcatgccgctggcggtaatcagacggacagtgcgcgatttgccggcgcggttcacgctggatgattccatggcgctcgggcccgaccacaagctgaccggatatccacggctaatggtcgaggcccgcatttccgcaagtggcaacgccacaccacaggctggcgatctcgtcggacgcaccggtccggtagctgcgggcagccacgaagtgcaaatcgtgatcgacagcatagtgccggatgcagggacggcaccggccgctgaccgtataccgcactagaagtgtcacgagctcgcaatcgcggtaggaataccggttgcccggtacccaccgggtcgccgtggcagtcacccgcttccgactcccacgtgtcgcacttgtcgaaatctactacgcgggctttgtcgcctcccgttgtcacgattcggggtgctcgcagggctctggagctgcctgacgtctagatgagcccgccggcggatacggccatcgatgccgagtaggcagaacaagaggccaactccatgaacgaagtgacgcatactttaagcaccgaacaatcttgtggacttgatcgcgagcaaattaatgtcaatttatacaaaccgccaataatatgaattgaatgcatgaaagatccagaaaatgatcattttttcactgggagctcctgcgatagagtcgtgatcggaagtcgatgaacgaccgagcaagccaatttggttaccaagatcgggataagcgtcacttcccttccataatctagcgagggaatcgtcatgcaattcgagtacacgccgaaggtcaaggagatgcaggccaagctgctggccttcttcgaaaggcacatctatccgaatgaacagcgcttcgaggaggagatcgacgctaaccgccgcgccggcaatgcatggattccctccacggtgatcgacgaactcaagccgcgggcgcgcgaagccggcctgtggaaccttttcctgccgcgttcgccgcgcgccgcgcagggcctgtccaacctcgagtacgcaccgctatgtgagatcatgggccgcgtgccctggtcggccgaggtgttcaactgctcggcgcccgacaccggcaacatggaaacgctggagcgctacgcctcggaagaactgaaggaccagtggctggagccgctgctggccggtgaaatccgctcggccttcctgatgacggagccagccgtggcctcgtcggacgccaccaacattgcctgccgcatcgagcgcgacggcgaccactatgtgatcaacggcaccaagtggtggtcatcgggcgcgggcgacccgcgctgcaaggtctacatcgtgatgggcaagtccaatcccgacgctgcccgccatgagcagcagtcgatgatcgtggtgccggccgacgcgcctggcgttaccgtcaaacgcttcgttcccgtgttcggctacgaccatgcaccgcacggccacatggaaatcgagctgaagaacgtgcgcgtgccggcttcgaacatcctgctgggcgaaggccgcggcttcgagatggcccagggccgcctgggccctggccgtattcaccactgcatgcgcagcatcggtgcggccgagcggacactggaactgatgtgcaagcgcagcctggaccgcgttgccttcggcaaggagatcgcccgccacggcgtgacgcaggaacgcatcgccgaagcccgctgcgaaatcgaaatggcccgcctgctcacactcaaggcggggtacatgatggacaccgtgggcaacaaggtggccaaggccgagatcgccatgatcaaggtggtggccccaaacgtggcgctgaaggtaatcgactgggctatccaggtccacggcgcggccggcgtgtcgagcgacttcccgctggccagctggtgggcgcaccagcgtacgctgcggctggccgatggtccggacgaggtgcaccgcaacgccatcgccaagcttgaactactgaagtaccgttcggatcgctgaagcgtaggcgatttcttcaagcctcccccgcgctaatcacgttgtggcgtggggaggcgctcatccatggagccctttgatttccgtgtaacgcgtgccaagaacgtgagcatcaggtgaccgatgcctgcgatgctttagggaagatgagtgcggggacggcccctcgaagtcggattgcaggagcgggcttcaaaccgccacaagctgcgtgggtgaagagcccccgtggtgagcgttgtcggaaaagtcgggggcaacctcggcaggtgggagtcaaagagacgaacgcgagtgaaccgctgatgacgtgccgtaaaaatcataatcgatgtcaaaaccggggggattgcatgctccgggaaaattttgggcgatgcctgctgatgtcccaatcggcatccggcataaaggcggcgtgactttgattcaggcttcggtaaggaactggggaatctgtcgtcccgatgcgaagggagaaatccaagcggaaggctccgcaaggatgagtgcaccgatgcggggggcgtacttgcattaatcgaatctgaagacaaagtgactcccgtgatccggagatcaggcgatgcggacggattgcgggcgtgcgagagccaccatgcggttaagcacgcctacgcggatcgccacttctgttgattgcgaagccgatgccacgcgcccaaaggcgattgacgttttgagccggtacatcaggttctcgatcagcgagcggcagtggtagccgcagcccctcttccattcccctcgccagtttcgcgcaatggcgtcaatggcctcgttgcgccactgcgcgccgggcgttctctcagaccaagcgccgccccttcgcgcggtgggatcgaggttgcgcgccgcgggcttcgatttgaggcgcatctcggctccgacgccatggctggccagccagcttgccaggcgggccccgctttcctcgtccggttcgccatcgctgtttgagacaaccacgatcgaaacaattgaggcaagccgaagcattggcagcgcatcggcaacagccctcgccgcctcagcctgccgttccacgcaattgcgacacggcctcgcagttgcggccaggcctttcccggcaccagcgacacaggccgtccagcgttcagcaacgcgtactccgccgccttggccatgggcgccggcacgttttcatctgtggacggcggcgtccggaagaatgatgtcggcgaagcggccttccctggcaagcgcccagccctcttctgcttcaacgacggcttgcctgatcggtatcgacggtgccgcctgcttcaccaggtctcgcaggacagcgtagtgctcggctgcgagagcggcgtattttccggcctcttcaccagcgccgcggtaaggctccagttgcgtgccagtcgccgtcagtccaacgatgctgccgtcgaacagcaacgcaagtcctgctgcggcttcaatgcgtgcgtctcgtgcatcgtcttccctgaggtcgacgagcattgtcctgaagttcattaaacctcctgcaagcttgaagaagaagcccggaatgaccggagacgggccttggcggattgcatgcgaactgaagtaaacagcgattcacgcctgccagataacgcagcgccccccgccagtcgatctggtaagactggcggtactccggcatggtggcggtccaacggagatcccgctcgatgtgctgccggagggcatcgctggacttcggctcgcggtggacgacgaatgattgccgcggcgtctggcccgccaagccaggtcaccagctcggccgcatcggcatgcgccgagagattctcgatctgctcgaccgtcgcgcgcacgacgatgtcctgcccgtggagccggatgtcgcgctggcccgcggccagtgcggctccccgttccgaccgcctggaagcccgacagcaggatcgtgctgcgcggggtcctgcccatacgccgcaaggtggtgcatgcgcccgccggttgccatgccgctgccggccaggatgatcttgggactgcgatcccggttcagccagaccgactgctccatgctctgtaccggcgttgccaggccgcatgcatcggcgcatgcagcgcggtcgatatgcagctcttccggatgcagcgagaagatcgtggtcgcgtcgatcgccatcgggctgttgaggtagaccggcacttccggaatccgcttcagctcgcgcagcctgtgcaggcaatacagcaagctctgcgtgcggcctaccgcgaaggcaggaatgatcaggctgtcgccgcgcccgatggtccggctgatgatttcgccgagtatgccgatggggtcgccgccaggatgcagccggtccccgtagggcgactcgaccagcaagtagtcagcctgcctccgcttccggcgcgcgcatgaccaagtcatgctggcgcccgaggtcgcccgagaatacgatgcgctggccttgcgcgagcagcgtgacgatggccgacccgacgatatgacctgcccggctgaactccgcttccacaccgggaaccaccgtgaagtgctggccgtagtgcgtcgggcccagccggcgcagtgcgtgttcgacatccgcactggtgtagggtggcaatgtcggccgatggcgcgagaatcccttgcggttggcgtaggccgcatcttccgccgccaggtgcgcgctgtcaggcaacagaatgccgcaaagctgcgcggtacccatcgtgcaataggcgctgccccggaacccgttacgcacgagcagcggcaggtaaccgctgtggtcgaggtgagcatgagtcaacaccaccccatcgaggctcgcaggatcaaccgggagcggatcccagttgcgcagccgcaaggtcttgtacccctggaacaagccgcaatcgaccatgacgcggtcgcgcccggtgtcgagcacgtacctggagccggttaccgtatcggtcgcccccaggaattgcagttgcatgccggcgtcctcatatcaatgcgagagctgaatcacagacccagtctaggggcagcaccacaggactgcgattgatccaggtcgacgggctggcgcacggcgggaagggagctgccgaatggctcaggcggcagtccgctgcaggcaggccaccacccacgaagccccggtggaaagcgccagcccgatgccgacaggcaaggcaaacctggcgccgcccgtcagggcagccgcgacgatcttgctgaccgtattggccgtcaacgcgccgagcaccggccatatcgacgcgtggtcatccagctttccggctcccacgagcgccccgatcgatgtcgccgcggcatgcgcgtccgcgaagccggccccgactgccagtgcaagtaggccgtattgccgccccaggcctgtgtcgcggcccccaccagctgcaggacaccaaacagcagcgcaaagccacccgctccgcgccagtcgaacgagcggccggctaacagcccctcgccggctgccggcgtctcgcgcagcgcccgccacagccagaccccgccacaggccgcgatcgccagcaggcccgcagccagcggcagtgccagcgcctgcaaggcggaaacgctagtggcgccgagcagcagcgttatctggatgaaggtagcgacggtcgacagcaaggccgccgcgacggggccgtggaccgggctgtcggccttgcgtgcccgcaccgccatcgcgccgatcgtggccacgctggaaacaaagccgccgaacaggcccgtcatgggcagcccgaagtgctcgccgaacatgcgcgcgaaaatatgccccgctgcccggccagcagcaccagcagcacgaccagccagagcgcatgcggattccaggcgtcgagcggccccatgtagcggtctggcagcagcggccagacgatcagggctgccgcagccaggatcagcgcatcgctcatttcctctcgggtgacgacgttgcgcgcgatgtgatgcaggaacgccttgccatgcagcaagagcaccacggcagtggcaaagcccgccgccagcactgcgtgcgtcactgtcaacgcgcccagcaggatggtgagcagaggcgaattccgtagtgagcccggcgtcccggttcgcggatcgctggtagctgatcgctgccagcaccgttgcgcccaacaacgcgaggggcagcagcagccgatcaggcagcatcgcgcagatggcgcccgacaggctggcgacagcaaaggtgcgcaaccccgcgggatcttcgccgccgtcggcggcggactggctgcgttcacgctccagcccgatggcaagcccgatgccaagcgccactgatacggaaaggatcagggggtccatgcccagtcctcaagtcgcgcggtcgtcacaccagtgaatccagtattggccactatcggaaactctgccacgcccgccgctccgggttgatgcatgtcaagcgcgtattactgcccggggggtacgctgaatacaacgaaacgcaaaaaagatcgcatactcatcactacccgtgagaagacacatcatgtaccagcgcatcctgctcgccgtcgacggcagccgttcgtccgacctggcgctgagccaggccatcatcgtcgcgaaggcgaccggggcggaggtcaaggcgctgttcgtgttggacgacagcgatatctacttcgagaccagctacttcgaccccaaggaattgttggacaacatcatggcggatggccgcaaggcgctggacgccgccacagccaggctcagcgaggcgggcgtcgggaacacggcgcagctggtggagaagccggtgtcgcccggccggatctcgttgacgatcgtcggcgaagccgatgcgtggaatgccgacctgatcgtgctcggcacgcacggccgtcgcggcgtcaggcgcttgctgatgggcagcgtgtccgaaggcgtgatcgccaggaccagcaagccggtgctgctggttcgcagcgaaaccgaaggctagcgtggcgcccgcacaatgacggagcatcgcgctatggcccagaccatgcgagccatgatcttcgagggcgcaggactgccgctgcgcctgcaggacgtgccggttcccgacccggggcccggcgaggtgtgcatcgccgcggctgcatgcgaggtgtgccacaccgacctgcatatcgccgacggcgacctctcccaccccaagccggcgctgatcccggggcatgaagccgtcggccaggtcgaatcgtgcggcaccggtgtcacggcattctcgcccggcgagcgcgtaggcgtgccgtggctgggaaatacctgcggtgattgccgctactgcatgcatcttcacgggaacctctgcgatgcgccgcagctcaccggatacacgcgcgatggcggctacgcggaatacgtggtcgccgacagcagctactacttcaggattccgcccgcctacgacgacgaacatgctgagccgctgctctgcgccggcctgatcgactaccggacgttgcgaatggcgggcgaggcccagcgcatcggcatctacggcttcggcgccgcggcccacctagtgacacaaattgccgccgcacaaggccgtgaggtctatggcttcactcgcgcgggcgacaccggcgcccagcaactggcctacgagaccggcgcgtgctgggccggctccagcgacctccagtcgcccgtggcgctggatgcggcgcttatcttcgccccggtgggtgcgctggttccctgcgcgctgcgcgccgtggacaagggggagcgctgtcgtctgcgccggcatccacatgagcgacatcccgcgcatgccctaccagctgctatgggaagagcgtcgcctgtgttcggtcgccaacctcacgcgcgccgacggaattgcgttgatgcagatcgccgtccggacgccgctgcagacgcacacgaccgcctacccgctcgagcaggccaatgcggcactggccgatctgcgcgaggggcgtctgtccggtgccgccgtcctgagaatccgtcactaaggcttcggcagatatccccatgagccgttaccagacacgtttccagacgcgggagcaggccggcacggagctggcgttggcattgcgtccgtaccaggggaccggcgccctggtcctggcgattccgcgcggcggcgtgccagtcgggcgcatcgtcgccgattcactgggtgccgacttcgacctggtgatggcgcgcaggatcgtgccaggcatggcgctggacgaatccggcgcgacatggtgcacgtacgaagccaacgcggacggcgcgaccgacagccagcgtgacgcccagttcgaccagctgcgccggcagcgcgcggtctatatggcggttcgcaagattgcggacccgaaggggcgcgtggtgatcgtcgtggatgacggcctggtcagcggcgcgaccatgtacgcggcgttggccggcctgcgcaagcggcgccccgcccggctcatctgcgcaatcccgatcgccgccagggccgggctggatcgggtccgcgccctggccgacgagatcgtctgtctggatacgccggatcgtatcgagaacctagcgcacttctatcgcgagttccagttggtcagcgacgaccgcgtcagacaattgaccgcgatacagccagcccaatcccaggctcgctcccggccaggcgccgtggtgcgcatgccatcgctcagccttgccctgcaaattccttatggcaccagccggctacccgccatgctcgaatcggcgccgaatccgatgggcgtcgcgctgatggtatgtgccggtggcgcgcagcgccgtgcggcccgcagccaatacctggcgcgcaagcttcgggcgaagggattcgccaccatgcttgtggacctgcagcccgagagcagggacaatgacgccccagaatcagaaatcgatgaccttgcgagaaggctaaaccaggcgctgattttcctgcgcgccaggatgccgtgcgcaaagcttccggcgggcttgctcagtaccggtaccgcaggggcggccgcgctgcgtgcggccgcatgcagcgcggaccttctcggcgccgtagcctgcgttgcgggacgcccggatctcgcgggcagtgcaaccttgcagcggctggacatccccgccctgctgatgtgcgccagcggcgatgcgcagaacatccacatcaataaccttgcattcgaacaaatgcactgcctgcggcaactgcggctcattccgcccagcacgcccacagtaaaggcatgcgtggcgatgccgggcatccatagtccgagcaccgctccggcctgcagcacgaatgccagaggcagccacgcataggccaggtgcagcacccacagcagcggccggttgcccaccgcatggccgcgccagccccacacgcgaattcccagcacgaacgccgccaatagtgacagcacggcgcctagccagccgggcaaaggaagcagcccggccgccagtcccagcacacccgccggcaccactgcgcggtcgacgttgcggtactgccgcaggcggaaaccgggaatcgcgttggtcgtgaacatcggaatcacccgcccgccaatcacgatcacgaacagggagatgagcgccacgccggcctggcaagcgcgcagcgcgccatcggtctgcccttgcgattgcagccagaggctgacgatgttcgcggctgccagcagccatagtgccagcgccagcggatagttacgccggctgccgcctttcaccagcgcgcgcgtgaaggccagcgcggccagcggcaggaacgcaccgtcgatcaccagcgccgcctcgcccgacgcggtccacatcgcgatacgccccgccagccacagcaggaacaggcaggccagcagcggcccggtcggtgtcggctggccggtccatgcacgcccagcggtgaacagaaagccaatcacgatggccaccgcaaagccaaacaccatctcatgcgcatgccacagcatcggcggcagcgatgccgaggatcccacgctggtgatgcccgccagcatcgcggcccaaagcgcaatggcaacggcgctgaatattgcgccgcccaggtagaagggccggaaacccagcgcgaagagggcaaagccgcgcggtggcggcccggcctccggcgatttgcgtggaccgcgcgcgggcaggatgggaatggtttccatagtgggagtaactccccttcgttgatcccggacaaaggtccggtctggacacaggctggctgcgagcacgatagcaccgcctgccgcctggtgtcctcccccgatggaactacctccaccggcaggttcttccccgcccctggctgtgctcccggcgaatgttcaagcgatgtggcggcccctacgctggcagcacccgtcaaagttgacacaggagcatggccatggccaccccacatcccgcgcgggcgccgatcccgcccggtgcctatacgacgctggcatccagcactttcgccttcaccatctgctttgccgtctggatgctgttcgcggtgctcggcattccgctcaagaaggaactcggcctgaacgacaccgagttcgggctgctggcggcaacgccagtcctgagcggctcgctgatccgcgtgccgctaggcctctggaccgaccgctacggcggccgcatcgtcttcttcgtgctgatgctggccaccgtgatcccgatctggctgatctcgtacgcgcacagcctgtggcaactgctggtgctgggcctgttcgtcggcctggccggcggctcattctcggtgggcacgccgtatgtggcgcgctggttcccgcgctcgcgccagggcctggcgatgggcatcttcggcgccggcaactcgggcgcggcgctgaccaagttcgtcgcgccggcgatgatcctggccgccggcacttgggaaatcgtgccgcgcgtctattcgctggcgatgctcgccaccgcgctggtgttctgggtgttctcgcgcagcaaccccgcgcacctggtcaagtccagcaccggctggcgcgagcagctttccatgctgcgcgacccgcgcgtgtggcgctactcgcagtactactcggtggtgttcggcggctacgtgggcctgtcgctgtggatgaccaagtactacatcggcgaatacggtttcgacatcaagaccgccgccttcctggccgcctgcttctcgctgcccggcggcgcgctgcgtgccatcggcggctggatctccgaccgctacggcgcgcaccgcaccacctggtgggtgatgtgggtgagctgggtcggcttcttcctgctgagctatccgcagacggacttcatcgtccagaccaccagcggtccgcaggggttccgcatcgcgctgacgcccacggtgttcaccttgctgctgttcgtggtcggcatcgccttcgccatcggcaaggcctcggtgttcaagttcatctccaacgacttcaaccacaacatcggcgcggtttccggcgtggtgggcctggctggcgggctgggtggctttgtcctgcccattctgttcggcatgctggccgacctcaccggcatccgcagcagctgcttcatgctgatgtacggcaccgtgtgcgtgagcctggtgtggatgcactacagccaccgcaccgaacgccagcgcaaggaacaggcagtgggcctgacccagccggcctgacgacccttcacataacgccaccaaccaacgcacaccatcatgtctacctccgtactcacccgctgggagcccgagaacgcggccttctggcaaagcaaaggcgaacgcatcgcctatcgcaacctcgggatctcgattccggcgctgatgctggctttcgtggtctggatgctgtggagcgtggtcgcggtcaacctcgaccgcgccggcttccagttcaccaagaaccagctgttctggctgaccgcgctgccggcgctgtccggcgccacgctgcgcatcttctattccttcctggtgccggtgttcggcgggcgccgcttcaccgcgatctccaccgcgctgctgctaatcccggcgctgggcatgggctttgcgctgcgcgacccgtccaccggctacccgacgctgctggtgctggcgctgctgtgcgggctgggcggggccaacttcagctcatcgatggccaatatcagcttcttcttccccaaggcgaagaaggggctggccaccgggctcaacgcgggcatcggcaacctgggggtgtcggtggtgcagttcgtcacgccgctggtagtgtcggtggccatcttcggcgcgcttggcggcgagccgcagcaattcccggccaacgaggccaacggcaccacgcagagtctgtggctgcagaacgccggcttcatctgggtgccgttcatcgtggtatcggcgctggcggcgtggttcggcatgcacgatatcgccgatgccaaggcatcgttcgccgaacaggccgtgatcttcaagcgcaagcacaactggctgatgtgctggctgtacgtgggcaccttcggttcgttcatcggcttctcggccgggctggcactgctgaccaagtcgcagttcccgggcgtgaacccgaccgcctatgccttcctcgggccgctggtgggcgcgctcacgcgcccggtgggcggctggatctcggacaagctcggcggcgcacgcgtcacgctgtggaccttcgccggcatgatcgccgcggtgttcgcggtgctggcagcgctgccgcatgacggcgccggcggcaacttcatgtacttcctggcggccttcgtcgcgttgttcgcgctgaccggcatcggcaacggctcgaccttccgcatgatcccggtgatcttcctgaccgagcgccagcgcgctgccgccggcaagggcgacgtggcgcagaagcaggccctgcaggaagccggcaaggaatccgccgccgtgctgggcttctccggtgcgatcggcgcctacggcggcttctttatccccaagagcttcggcacctcgctggagctgaccggcgccgccgacgccgcgctgtattgctttatcgccttctacctcagctgcgtgctggtgacgtggtggcactacgcgcgccgcaacgcgcccatgccttgctaacagccgccggccggactagttccatcgaactagtccgccctccgtcacctagcccgaccggcgtgcggcgcctgttccaccagcgaattggcgccgccgccctccccccttaagctgagcgtgtccctgcaaacgctcccgcaaccgccggagcccccgcagcaaagcactcgcggagaacaaagcaatgagtcatttcctggatcgactgaagttcatgtcgcgcgtcaagtccacctatgcggacggccacggcgcggtggtgaacgaagaccgcaagtgggaagacggctaccgcagccgctggcagcacgacaagatcgtgcgctccacccacggcgtgaactgcaccggctcctgctcgtggaaggtctacgtgaagaacggcctgatcacgtgggagacccagcagaccgactatccgcgcacgcgcccggacctgcccaaccatgaaccgcgcggctgcccgcgcggcgcctcgtacagctggtacgtctactccgcgcagcgcgtcaagtacccgatgatccgcggccgcctgatggagatgtggcgcgaggcccgcaagaccatggaccccgtcgccgcgtgggaatcggtcagccaggacccggtcaaggccgcgcgctacaagagcgtgcgcggcctgggcggcttcgtgcgtgcggactggaacacggcgaccgagatgatcgcggcggccaatgccttcaccgtgaagaagttcggcccggaccgcgtgatcggcttctcgccgatcccggccatgtcgatggtgtcgtatgccgccggtgcacgctacctgagcctgctgggcggcgcctgcctgtcgttctacgactggtactgcgacctgccgccggccagcccgcaagtgtggggcgagcagaccgacgtgcccgaatctgccgactggtacaactccacctacctgatggtgtggggctccaacgtgccgcagacgcgcacgcccgacgcgcacttctacaccgaggtccgctacaagggcaccaagaccgtggcggtctcgtccgacttcggcgagatggtcaagttcggcgacatctggctggcgccgaagcaaggcaccgacgccgcgctggcgatggccatgggccacgtggtgctgaaggaattccacgccagcggcaagtccgcctacttccgcgactacgtgaagcagtacaccgacatgccgatgctggtgctgctgcgcaagaacgacgaccaccagggcacgctggtgccggatcacttcctgcgcgcgtcgcacctggccaataacctcggcgaagccaaccatcccgaatggaagaccctgcagattgacgacgccaccggcgagatcgtcgcgcccaacggctcgatcggcttccgctggggcgaaggcgcccacaacggcggcgaaaaggtcggccgctggaacctggaaatgaaggacggcggcagcggccgcacggtcgacccgcgcctgtcgctggtcagctatgccgatgaagtcgttgaagtcggcttcccctacttcggcggcgagcacgatgagctgctgcgccgccgcgtgccggcgcgccggctgacgctggccgacggcagcaccgcgctggtggccaccgtgtacgacctgcaaatggccaactatggcgtggatcagggcctcggcggcccgaacgtggccgcgtcgtatgaagacgatgtgccctacacccccgcctggcaggaaaagcacacctccgtcccggcccgtctggtgacgcaggtagcgcgcgagttcgccgacaacgccgaccgcacgcagggcaagagcatggtgatcgtcggtgccgcactcaaccactggtaccacaacgacatgatctaccgcggcatcatcaacctgctgatgatgtgcggctgtatcggcaagagcggcggcggctgggcccactatgtcggccaggaaaagctgcgcccgcagttcggctgggccccgctcgccttcggcctggactggtcgcgcccgccgcgccagatgaacggcacctcgttcttctacaaccacaccagccagtggcgccacgaaaagctgggcgtcgacgagatcctgtcgccgaccgccgaccgcaagcgctatgacggcctttcgctgctggacctgaacgcgcgctccgaacgcatgggctggctgccctcggccccgcagctgggcgccaatccgctcgacgtggtcgatgccgccgagcgcaacgggcaggaccctgtggcctacacggtcgagcaactcaagtccggcaagctgcagttcgcctgcgacgaccccgacaacccggccaacttcccacgcaatatgttcgtgtggcgctccaacatcctgggcagctcgggcaaggggcatgagtacttcctgaagtacctgctgggcacgcagaacgccgtgttcggcgacgagaacgatgcgatcacgccgagcgaggtcaacgtgcgcccggccgccgaaggcaagctggacctgctgacggtgctggacttccgcatgagcaccacctgcctgtacggcgacatcgtgctgccgacggcgacctggtacgagaaggacgacctcaacacgtccgacatgcacccgttcatccacccgctgtccgaagccgtgcagccgctgtgggaaagcaagaccgactgggagatctacaaggccatcgcgaagaagttcagcgagattgccggcccgtatctgggcacgcgcaaggacctggtgtgcacgccgctgctgcacgacaccccgggcgagctgggccagcccttcgaacccaaggactggaaggccggcgaatgcgacctgatccccggcaagaccgcgccgtcgatgaccgtggtggagcgcaactacgcggacctctacaagaagttcacctcaatcggcccgctgctggacaagctcggcaatggcggcaagggcatcaactggaatacccagcatgaagtgaaggagatcggccagctcagccacaccgtgcaggagccgggcgtgagccagggccggccgaagctggaaaccgcgatcgatgcagccgagatgatcctgaccttcgcgcccgagaccaacggccacgtcgccgtcaaggcctgggaggcgctgtcgaagatcaccgggcgcaaccacacccacctggccgagggccgcgagcacgacaagatccgcttccgcgacgtgcaggcgcagccgcgcaagatcatctccgcgccgacgtggtcgggactggaatcggaagaggtcagctacaacgccggctacaccaacgtgcatgagctgatcccctggcgcacgctgaccgggcgccagcagttctggcaggaccaccgctggatgctggacttcggcgaaggggcgtgcgtgtacaagccggccatcgacaccaagacggtggcgccgatgctgggcaagaagcccaacggcaacccggaactggtgctgaactggatcacgccgcaccagaagtggggcatccactccacctactcggacaacctgcgcatgctgacgctgtcgcgcggcggcccgcacgtgtggatctcggaaaccgaggccaaggccaacggcatccgcgacaacgactgggtcgaggtcttcaacgtcaatggcacgctgacggcccgcgtggtggtgtcgcagcgcgtgcccaagggcatgtgcctgatgtaccacgcccaggaaaagatcgtgaacgtgcccggcgccgagaccagcggcatgcgcggcggcatccataactcggtcacgcgcgccgtgaccaagcccacccacatgatcggcggctacgcgcagctggcctacggcttcaactactacggcaccgtgggcagcaaccgcgacgagttcgtgatcctgcgcaagatgaagaaggtcgactggctggaagggccgctcgtggaaaagactgcgaagttgactgtgaatgaaggagcctcgcaatgaagatccgtgcccaggtggccatggtgctgaacctcgacaagtgcatcggctgccatacctgctccgtgacctgcaagaacgtctggaccagccgcgacggcgtcgagtacgcctggttcaacaacgtcgagaccaagcccggcatcggctaccccaaggaatgggagaaccaggacaagtggcagggtggctggaagcgcaacgccgacggcacgctggagccgcgccagggcggcaagctgaagatcctcgcgaacctgttcgccaaccccaacctgccggcgatcgacgagtactacgagcccttcacctacgactacgagcacctgcagaaggcgccgctggtccagaccccgcccaccgcgcgcccggtgtccgtgctgaccggccgcaagatggaaaagatcgaatggggcccaaactgggaagacgacctcggcggcgagttcagctcgcgcggccgcgacaagctcttcgacaacgtgcagaaggagatgtactcgaccttcgagaacaccttcatgatgtatctgccgcgcctgtgcgagcactgcctgaacccggcctgcgtggcctcgtgcccgtcgggctcgatctacaagcgcgaggacgacggcatcgtgctggtcgaccaggacaagtgccgcggctggcgcatgtgcatctcgggctgcccgtacaagaagatctacttcaactggcagagcggcaaggccgagaaatgcctgttctgctatccgcgcatcgaggccggccagcccacggtctgctccgagacctgtgtcggccgcatccgctacctcggcgtgatgctgtacgacgcggaccgcatcgagcaggccgcgtcggtggccgatgagcgcgacctgtaccagtcgcagctcgacgttttcctcgatccgcacgatcccgcggtgcaagccgaggcgctgcgccagggcatcccgcaaagctggctggatgccgcgcgcaagtcgccggtctacaagatggcgtgcgagtggaaggttgccttcccgctgcacccggagtaccgcacgctgccgatggtgtggtacatcccgccgctgtcgccgatccagtcggcggccgaggccggccacatgggcctgaacggcgtgatcccggacgtgaagagcctgcgcatcccggtcaggtacctggccaacctgctgaccgcgggcgacgtgatgccggtgctgtcggcgctggaccgcatgctggcgatgcgcgcctacaagcgctcgcaggtggtggacggcgtgcaggacctgggcgtgctggagcaggttggcctgacgcccgcgcaggtcgaggacatgtaccagaccatggccatcgccaactacgaggaccgcttcgtgatcccgtcctcgcacaaggagatggtcgaggacagcttcaacgacaaggccagttgcggcttcaccttcggcaacggctgctcgggcggcacctcggagggcgcgctgttcggcaagaagccgcagggcagcgtccactttgtcgacatgcccaagtcgcgcaagaaagccgtgatgagctgagcgcgtgcccgcatccacgaatcgcccggagaagaccatgcccctctatcccatcctcagcgccctgttcggctatcccgagcaggatctgctggacgccctgcccgagatcgatgccgcgctggccgaatggccgcaggtgcgcgacctgctggcccccgtgaccgacctgctgcgcagcgagtcgctgatcgcgctgcaggagaactacgtcgccaccttcgaccgcaacccggcgcactcgctgcacctgttcgagcacgtgcacggcgaaagccgcgaccgcggccaggccatggtcgacctgatcgacgagtaccggcgcgaaggctttgaaccggcggcgtccgaactgcccgactacgtgccgttgttcctggagttcctcggcgcgctggtggccgacggcaaggaagcgcgcgccgaacagctgctgggcgaagcgatccacgtgctggccgccatcggcgagcgcctggcgcgcaatcaaagcccgtacgccggcgtgttcgcggtgctgcgcacgctgaccgacgtgcagccacaaccgcagcaggagccgccggtgcgcgacatggacgaggcgctggaaaccttcgggccgggggccgatggcgtggaaccgctgctggccccgcaggccgggccgcaggcggtgaagttctatccgcgcgatccgcgggccaaggcgccagtgccggctgcctgctgacagggcatggcaatgcaaaccgaacaccagacaatgggttaacacaccatggcaacgctccaccaattcctcttcggcatctacccgtatatcgctgccgccatcttcctgttcggcagcctggcgcgcttcgagcgcgagcagtacacctggaagaccgacagctcgcaggtgctgtaccgaggcaacctgcgcaccggcaacatcctgttccacgtgggcatcctgggcctgttcttcgggcacctggtgggcctgctgacgccggtggcggtgtgggatgcgctaggcgtctcgcacggcttcaagcagggcgtggcgatggccgccggcggcgtgatgggcaccatgtgcctggccgggctgctgatcctgctgcaccgccgcctgaccaacgcccgcgtgtcggccgtcacccgcaccggcgacaaggtgctgctgctgtggctgctggtgacgctgctgctgggcctgtccaccatcttcgaatccgccagccacatggacggccacatgatggtgcagctgatgacctgggcgcagcacatcgtcacgctgcgcggcgacgccgccagctatgtcgcggatgcgccgctgctgttcaaggcgcacctgttcatgggcatcacgctgttcgcgatcttcccgttcacgcggctggtgcatgtgtggagcggctttgcctcggtcggctacctcggccgtgcctggcaactggtgcgtagccgctgagcgccgcaaccccacaaggagaacagcatgcctgtcaccgtcaacggcgtggaactgcgcgacgccgacatcgaacgcgagctggaccaccatcacgatgcggccaacccggcgcggctggccaccatcgcggccatcctgcgccaactggtgcgcactgaagccgaccgcatcggcctcgccgccgaagggctggacgacgacgcactggcgctggccctgctggaacgcgaggccggcatccccgagccagacgaagccagctgccgccgccactacgacagccggcccgagcgctttcgcgacggcgaatgggtcgaggccgaccatatcctgttccaggtcacgccgcgcgtgccgctggacgcgctgcgcgagatcgccgcgcagacgctggcgctggtgcgcggcgacccctcgacctttgccgagcatgcccgggcgctgtccaactgccccagcggcgtcaacggcggccgcctgggccgcgtattccgcggcgagaccgcaccggagttcgagcgcgcgctgttcggggcgctgcaggacggcgtactgccgcaactggtcgaaacccggttcggcctgcatatcgtgcgcatcctcgagcgctaccccggcacgcgcctgcccttcgacgcggtgcgcggcgatatcgcccgcgccctcgcagccgccgcgcgcgaccgcgcctggaagcagtatgcaagcctgctgatcggccgtgcccgcatcgatggcatcgaactggaaggcgcggacagcccgctggtgcagtagtgccggcgattaggccgtacaggagcccgacctgcatcagggcactctgcccttgcaagcgcccgcccgctcaaaactcgcggacagcaccctgcggccgggctgtgcgctcacgtcccacacacagagtaagcgtcatgcaagaattcgtcgtaggcatcaccggcacgtccggcagcggcaagaccacgctgatcacggccatgctgccgtggttccgcgagcgcggcctgcgcgtcaacgtcgtcaagcacagccaccatccgcttgagctcgaacctccggccaaggacagcgcacgctttcgtgccgccggcgccagcgaggtcatggtggcctcgccctaccgctttgcgatcgtgcatgaactgcgcggcgatgccgagcccaccttggccgaacagctcgcccggcttgcgccggccgagctgacattggtggaaggcttccgcagcgacgcgattccgcgcatcgaggtgtatcgcccggtgcacggacgcgagccctattacccttgcgacccgtcaatcgtcgccttggccaccgaccgaaacaccgacgccgcgctgccctgtctgccgctcaatcatccgccggaagtcgcccagttcatcttggcgctgcgggagcgccatactgggaaacggatgctgcatcccgcagcgcatcgccacggcttccgcgcacccgacgcttcataagcgcggctccgcctgtcgcgtcgacgccccaggaccgcgcgcagatgccacagcggtgcgactcgggccgcgccacaaacgagttctcgtccgccgatcaaggctcgcgctgcggcagcccgttgctcccggcgcatctcccggcgcaccgatagttgagtggcaaggcgatgccacatgctgggcgccaactgaaggtcgccggggagcatctgcgcgagctctcgcacccggccccaacaaagcctgctcgcggcgcagatgggtgaaactggagaaacgacaaggcaggagcacgttgtcgaccgcactcaggtatgccaacaccttgaactgctgaaagatgtacctgaaaatgatcgcctcgccacctctcgcgccgcgcggcgctcagttggcgcaaatcttgcttataaggccgtttcttggccatccgcgcgacgcgtcgcgcgaggtccgtctttacgattgacttcctgctggcctgcctgttttgcgcgtcgtccagcgagctgacgcgctactcccataccgaccaggctcagcgataccggcgaactggaatggacggcttcgctccggcccgcgcggcgcaagcggcgcagcgccgtctatgcccttcagcaggagcggctgtagagttccttgatgccggcgatgtccaccagcttgacgtggcgttgccgaatctggattagccccgcttcggcgaagcgcgagaacaggcggctgacggtttcgagcttcaggcccaggtagctgccgatctcttcgcggctcatgcgcattacgaattccgatgccgaatagccacgcgccgacaagcgttccgacaggttgatcaagaaggcggcaagacgttcttcggcccgcatcgcgcccagcatgacgagcatcagctggtctcgcgtgatttccttgcccattaggcgcaggaactggtgctgcaacgagggcaagtcggccgacagggattgcaggtcgttgaggcggacgacgcagacttcagtatcctccagcgcggcggcatcggaggcatgctgcatttcgcccagcccgtcgaggccgacgatttcgccaggcagatagaaaccggtaatctgcgaacggccgtcttcggtggtgacgtgggtcttgagcgtgccgaagcggaccgcgtagacggcagcgagcggatcgcccatgcgatacagggtttcacccttttgaacgcgaatgcgttcctgcactagcgtgtccatcctggcgaggtcttgctgtgacatccccatcggaaggcacagttgccccatcgtgcacgtggagcaacggggcgacatctcggtaatgggaacggatggaagcaattggaacctgcaggattggtcccgcgacacgatcattttaccgtgcgatgcgatgcggcattgaatcagaatatgaaaatttcagtacttttttgcattttttggctggctttgctcagtgggatgcactgcgccgcccaagtgtggcggtatcgcgctggcagtgaagtggtcatcaggatggtgcgctgcttgaggctggcaaccgacgcgaagaaggcggtgatctcgtcctggctcaggatgaccggcagcctcaccggcttcttcgggagagggaagtcctcatcgctccagtcgcgtctgagcatcacgcgatagaggaaccgcagtgcgccgatggcaggacagaggctgctgggcgcaagcttgcgctcctcacgcagatagacgcgccaggcacggatctcttcggggccgagtagttcaggcgagcgccggaagtgcggggcgaaactgaaaacttgcagcagataggacttctgcgtgttgtcgatctgcatgtcggccagcatgcgttcgcggagcggtgtcatgacgaacctcctgggaacacggaatgaaatgcccggtcgggcacctccatgctgctcccagccgccggctcatcccttccctgggcccggcaccagacaaccgttctcacagaacgccaggcactggcctccgcttccctcccactaccgcgtcagcggtttagtacaaggcggtatcttggtcagccccctacttcaatccgagcagttcatatacttccaacggtttctgccggcctttcacctgaatgacggtcaccggacgcacaatgacctgatcctgcacgcgggcgtagacggcggcactgatcaggatttgatcgatcccggcatgttcctggatgcgcttggcgatgttcacatcgtcgccgatcgcagtgtattccatgcgctgcttgccgccgaccagtcccagcaccgcctcgccgacgtgcaggccgataccgacggagaggtgaaacagcggggagatctgttggtacagggcctggatggcctcccggataccgagcgcggtgcgaagtgcacgcattacatggtcgggctgggggatgggggcattgaaccaagccatcaccgcatcgcccaggaacttgtcgatcgtcccttcctgcgccagcacggcgtccgtcatcacaccgagatagcggttgagcaagccgaacagatcgtccggattcagttgctcgctgatgccggtgaagccgtggatatcggcgaacagggtggtgatctcggtgcgcttgcccgccggctgcaaatgctcggtatcaatctgcgccaggatcgccggcgataccatgtgtttcagcaattgctgctgggcttccatcagccgcttttccgtcacgtcgtccagcacgatcgcgatgccctggggctgctgcaagcctttgagcgtggagaggttgaagcgcagatagacagtaccgcgccctgtgacagtgggagcgagctcaaggccgattaccggcttgtccgtgcgagccgtgctcagcacgtgcgacagcagggccaaccccaacggaggctggagttcgacgatgttgcgcccgaccagttcttcggcctcccgataccccaggatgggcaaggcggccagattacacagcatgattttcccttggagatcggtggtgatcactccgctgacgatggaggcgaacacattgtcgagcagatccttcagctcggtggtctcggtcagcgcgtggcgcaattgagcctggtgttcctgcagccgctcggccatccggtcgaaggagccggccaattggctcaattccccatgccccggcaacagcccggtgcgcgcttgaagatcgccttcctccagccgctcggtggccgcgagcagggcgcgtgccggacgcaggataaagaccgcgccgaaccaccaggccgtggccagcgcgagcaaggcgactgcgctgaagaacagcaggcggtaggcgaaggcgcggttcacctgtgcgaacgccaccgaggtcgggatgccgaccgcaagatacccctgagtggtgatgaccaccccgcgtgcgctgcgcagcggcgcgaacgcgaacaggctggtcacgccctccaggttggggagctcaaccgtgccttcctcctggtgggagagaatggcttcgaccagcgggttacccgccgcggcgacccccatccagcgtcgccaatctggatgctcgaagagcacggtgccgtggcggtcgagcacgatgagcacggcatcgggcggcagacgcgcctcaacggccaactgctcgagccacctcagatcgagtgcggcgtataccacccctttgggggagccggtctcatcgaggatcggatagccgaagttcacactagctttgccggtgatgcggccgatctggtaatctccgatcgccaggcctttgtactgcagcgcacgctggaaatagccacgatcggcgagattcaccggttcggccaggcgcagcccgctgcagtacacattgccttccaggtccgcagcgcccagattggcatagaaggggtactgcttaaggaaattaccaaacagagtactgcaggccgcctcggagcgatcgtgcaccaccggaatttgggccagcgcgatgagcaattgtcgtgacccctcgatgaaccgctcgtgctggctgatcgtcaggtggagcaggcgtacggtatcttcctggacgcgcttctccgcagcatgccgctcctcaaggttcgtggcaagaatcagcagaagcattggcagaatggcaagcagcaccaacagcagcacccgcacccgcaggcttccggttttaccgctaacggcagccgatgggcggaagggccttttgaggcgagggacagacatgaggtcattccctccgcggtactcgcccgagcgcgctcaatggtccgccctgaccttccgggggctgaccccgtaggatcggctgggtggcgctgacattcggcattcctcgctccgctcataggaaggtgtcggtaatgtctatcgacgagcgttgacccggcgcgtcgaagcttgccgtcagccaggcatcggcacgctcgcgtcccagacgtgccaactgctatcaactcagtccgaggactgggaggtcggacgcttcgcgtcgtgtcgccccgcctcagcctctccagggctcacgcggccgcgatgtcgcgacgcatcaagagcacagcgcgctcaattcatcataaccggaaggcttatggatagcggattgtatcttggccggcacgccgaacaccgttggctcaacacttgcagctcccaatggattcgtaaatcttgcgcaccgaattttcaagatattattcgaactgccccccgttaaaggcaacgcggtgggcgaattggttgacttgccggcgtccttaaggcgtatgctgctcattacttctctacgttgagatgccgcgagggatcgcacgccggaggtgcatgcgttgccaagggagatcgcacgccttcaaagccctctgctcggcagcactcacggcgagtgcgggctttgtggcggcgccccagtgggtggggtgaactaagtgggtgttgttcctgcatgcctccagccacgccccactggctggcggcatgcaggaagcaaaattatgcaaaccgacgcctggcctggtcgatgtacgaatgaggggcggctcagcgtatttcataggggcccgcagcgcgcgataccggctgcgagaaggcgaatatagagctgcagcccacgctgtcagtctgaacacgcgaaaaactggcgcaacagggacgcggcttcagcagcggtgaagccgcgcccgaagcggagccactctgctgccggtaggcggtgccgctgctcacgacacgggaaaaaatcgtaagttaagcgtgcgcggaggccggcacgcagcagtagagcgtaggaatggacacgccaggttcttggccacgtccttgggcgggacgccgctggcgagcagcgccttggccgactcgatcttgctgtccgtcatcttgggcttgcgcccgcccttgcggccgagccggttctcgctcataccggccgcgcctccgcgagcaccttcatccggaacttcggcggcaggtcggcaggcgtcagcagatcgacgtggacgccaagcagcgtttccagctcgtcttgcaagccgcccaggtcgaacagcgtcgcgccgggcagcgcgtcgaccagcaggtcgaggtcgctgccgtcccggtcggtgccgtggagcaccgagccgaacacgcgcaggttcgccgtgcgaaagcggctcgccgcctcgcggatggcgctgcgcttgaggtcaagcacaacggacggtcgcatgggcatctttcctttgaaattcggggaaatggtatgtagttgagaatagcatttcaagaactatttttgagaagctggggtattccgatccaacccaaatgctgcacgttcggaaggtactcaggggcatcgccgcggtccgtcccgacgcggcgttacgagccctagactagtgcgcacgctcgaggaccctacgtcaacgcgctttgccgaccacgacacgctgcgatgtgcgcgtggcgaaatagccgatgaggtcgaaccggccgcccggcgtgtgttcggcgctcagggcagcgcatggctcgcgcccatttggcgaaccctggcgcgcgcggcagaacacctgccgttgtgccgggacgaggacgagacccatgctgcgccgctgtggctcaaggccggagactgggtcgcgacccaggacgctgtcgcgcgcatcgaatcgcggcgccggattcctcctgcgctcagctggatggccgaggcacaatatcaccagcagggactggaagccgtctggccgctgttgtccgaactcgcatggctgtcgccgcgccgccttgatgcgctgatccggcgcttggtggatcctttgctgaggacgttgcgcaagaccttcgacgcccgtttcgatggcgacgggacgatcgaggatctgatttggttcccggcggggtgttgatcgaaaagccgggcctagccagcctgctgggcaggacgcagccgtcaactcaccgcccgccagagcgggtcatgcgcctggtgctggaactgctgaacctggagcgaaagggccgccaccacgacctggtcgaacggtgcaaggcgctccagagtctgcatccgtcgctcttcgccaagtacatgagcagccggtgatctggacaaggcggcttcaaagcaccgcttcgaggcccttgcgctcgatgaggttgagcagcttcacagaggggccactcggcttcttgtcgccaacctcccatttgcgaacggttgacaggctggtgttcaacaccgaagcgagcaccgcttggctcaagtgcagatgctcacgcaacgcccggcgttcgcgggatcggcgaactgcccaggtcggcaaggtgttgctggccggcggcaagcagtaccgccgtgtcatgcgcgccgcgctcgctcgccagtacaacaccaccctgcctgccgtacaggaaacgaccggcggcatcggcatgcaacgctcgcaactcggcgcatttctcgacggtctcgcgccgatgttcaacgaaccgatgggccatcaccccaatggcacgccgctctaccggcgctacggctggatcgaagccggtgccgtgacccacctgatctaccgggcggccccttacctgcctacgctccaggcccgcgtgcttgctttgttccaaggcccatccggaccgaccgccgatgttgaggtcgaggaacgcttccgcggcggtaccagaattggctctcgctgggtcggcgtggctgatctccacccgctgcaggaggccgcatgagcgaattcgacaaggcgttgcaccaggaagcgaaggcactcagcgtgaacctcgatggcacgcccgaggcgctcctgaccgtggcgcacgccggctacaaggcttgggccaaggaaggcaacctgcatttcccagacgaaacgcgctacgccctgctccatgagatcctgcgttactgcgccgacgagtgtttgcttgagtgctatccgtcgcaggagcgccgcctgcgcgagattgccgagatgctagatcagcgctatccgcgctatgcctgtacgcgagcgcgtctgcgtgcgcgccgcaatcgctacggcaggatctgcgacgatgcacgccgtgccccccctgcgtctgccagcaatgatgtcacgtctcaaagttgatgggagaccgatcgcaaacaaatcaatgggttacaaggcaccgcctcaagttaactgagccaaattctcacagaaactggttaaaagacgcagcttgtctcacagtaagtgggtacacggagacgacggagtggaaagaaccgcgtcgctccacctccctatcacatggccatgtgaaatcgcatacgcgcatgagcgcggagaaagtgtcccggcgaacggtcgccacgtgcttatccagtgcggctgcgcgcgcgagggcggcgccagaagaaaatcgctcgatacgcgagacagtcctccacggtcagcgatgacaccgcacgccgacgctcacacacggcccagagcagcatgcgtcccgcctccttgcccggcttcccctgtggtcttcagtgcgcgatctcacgagtccgcacaggcagattcaccgacgacgctccagtcgaaacgcttgtaacctcaccgacatagtagatgcagactccagcgcggcgccccccttctgacatcatcagcgccttttacccattaactttgagaatccaacccactaactgtgagacaaaactcaacaactttgagacgtgacagcggatcgcgggcatgctcgatgccgcctacccccgctacgcctgtacccgcgcaaagctcgccgcgcgccgcaaccattatgggcggccgcgattctgaactctcgcctgcaagccatatccgccgcatagcggcggcaggggtgtgggatgggttcaaattcagtatataacagcgggtatggcaaaaatggactccctctggctcagcaatcccagcctggcctaccgtgactggcaggcgcgtgaggcggctggctctgatcgccgccctttctccgcgcgctcgatcgtccagcaccaggcgatgttcgagaacttccgacgacacttgctggcgaggagcgcgaccgttgcctcatttggcaccgccgatattgagtcgtttttgcagacgcccgacgctaggtcatactctccggccacacgcatgcggtacgtgaagctgctggaccgcctgtgccggcatctggtcttcgccggtgtgcgcctggacaacccagccgccctgatgctttccgccgagcgctggccagaccaagagcccacaccccagttccttgacgaggccgaggacgggcggctgcaagcctatcttcaatcccctgccgacgatctgtccggcttgcgtagccgggcgatcgtcgcgatgtttctcgcaacggggattaccgcggcggaagcgcgagccgcgcgtttgggggacctagtgccggatacaaacccgccctatctcttcgtgacgggacatggggcgcgggacgcgcgcactgttcacgtggccgaattcgctgtatcgctacttcaggcctggcatgcccgccgctcaacgcttcccgtccacggcgacctgctttttacccttaccccggatggccgccccatcaccgacatgagctttggccggatcgtggccgccgcgctggaagcgatagaattctccggcgtcgagccaagtccccgcacgctgcgcaatactttttgccggcgtcagctgctcgctggctgtacgcacgacgacgtgacccggatcttaggacttgccagcaatcgcacttgcgaccgcattgccgctaccatttcggctgcccgacggcgaaaaatcctgaaatgatcggggtttcagcgcatctcactattgcactcgcgcttgcatttgctattcttcgcggatgcgatgtacgcgatatcccgcgcgcacgcatttcttaatcaggtacgactatggccacgaaagcatccgcgaagactgcaacgaagaccgccgcaaagaaggctgcccccgcaaagaaggctgccccggcgaagaaagccgctccggctaagaaggctgccgcagcctccccggttgccaagccgctgaaggacaccttcaacaagtcgagcctcctcgcccatctggtcgcccagaccgaactggacaagaagactgtccaaaccgttctgactcacctggaaaacaccatggtgagcgcgatccacaagaaaggcgcaggcgagttcaccttccccggcctgttcaaggtctcggccatccaggttccggccacgaaaaagcgcttcggcaagaatccgttcacgggccaagagcagtggttcgccgccaagccggccagcgtgaaggtgaaggttcgcgcgatgaagaagctgaaggacgccgcgatgtaatcgctacggttcccgcgaaccaaaggaaaagccccgagattttgctgatctcggggcttttttttcgtaggctctctgagaagagagagtgctgaggcgtagcaaattaccaccacgccaacttggaagtgctacagatcggcgagataggcgattgcgcatccgccgtccgtgccggccaggcgttggccctcacgacagacggagaaatcaactaccttgcgttcgatctcgctggccaactcgcgcaattgctgcgcggcttcggcgggaccggccgtcccctgaaacgttgggccaccaatatcaatgtcgacaatgaggtgcatgatctgacctcacgcggtaatccggccggcagcaatttctcgttggatctgttgcatgccaagctcgatggaagcagccacaagccgctcctgttcctcacttagaatatggttgttcgaagtcatagttggagccagaaaagaaaagcccgctcccctttcggagatgcgggcgtgttggatgatgggcagccttactgcgccgccaaggcaagtacatcgatgacaccgtcagcctcgtcgacgagatccggcgtttgcgagatgaagaactcccgttcgtagccaccgatacgcagcacttcgcgcttcattttcatgaaggcgcgcttgcgctcaggatccaaggggccatcggcctcatcggtaaagagggtctggaacggttgctgcgcgtcctgcgcccggtaaagggcgattccacgcgtcagacactcgttgatccataccttctgtccccctgacatcacggagaaatccttcgtgctgtcgttgtcggcgtcgatcacgtcgatggcaaagccttcccgcttctcgccgttggccagctcggtctgcgtctgaatcgcgatggtgaatcgcggtccgtagcaggcaagcaacaggtcattgacgatctgcgtgatggccgggcccgcgtcatcgatagacaacgcaatgacgccatcattgcccaggccctttgccaacagcttccactgcgcgatctggtcggacagcgcttgcgtcttggcctctgccgccggcaaacctgcaagctcggcatccaggcgctcgcgctcggccaccagcgtgccctcctgccgaatcagtgcttcgatccggccggcgatggcagcgccaccctcccggctggcagcgatctggcggtccatctgtcccagcatgccggtcacatcctctgtggccagtgctgccagttccctgcgcaccgcttcaagctgggcttgcacgtccgcagcatcccgcttgtggcggtctacgcgcgccgcttcttcctcagtcagtgccgtcagatcacgatcagcctgcaccagcccttcgcgcgcggcgtcgagcattggcttcctggccgccagcgccgtgagacgctgcagcgactgctgatcacgctccaggtcggcccgcagtgccgcgaaggcgctccgcgcctgggcgcgcgccgcaagcgagtcctgcatcgactgcgcctgtgccagcttcttgcgatagctgtcgcgaagcgcctcgaccgtcactgcctgctcactgagaccggctttggcattgcgcgcctgtgccaacaacgggcaggcggcgtgcatcgggtcgtcccagcaaggaaccgtctcgatgacgtcggcctgcagcttcagcgacttgaccaattgcgccgccgaggcaccgcgttgttccaggcccttgagctcggaactgagcgccgcgtgctcgacctgcacggcatcgagcttttcaacagtcgcctgctggctggccagctccgcctgcttccggccgatggccagttgcaaggcatcccgctcgccggcggccgattcgatggccgaggcctccgccagcactgcgcggtggcttgccgcatttcggtccagatcgcgtcggcgcaccgcagcacggccggcagccgcctgctcgtcgctgcccagcaataccgcacgctgctccaactcacccttgcgctggttcaattcccgcaaccgcgcttcggtaccggcattggcctcctgcttcgcagccagcgtcgcgcgttcctgcatcagcttggcgcccgtggccgtctccacgtcccgggcctcgcgctgggcatccaggctttcgcctacctgccagatctccttggcaaccaccgcggcgcggtcgcgctttccggagagagtcaatacgtcgcgctgcagggtatccagcgagcgggtgagcagtttggcaacctcgcccgctttcgccgacaagtcgcgcaggtgctcgatcccgagcagttcggcaagcagcttcttgatctcgccggcctggtaactggcgagcggtcggcggttctgggcagaaaacacgctggtgaagaacgcctcgggcgacccgagcacggcctccagacaccggttgtaggtgtccgccttaccgtccgacagcgtcccgtcagccaactgcagcggcttccagtcacctcccgcgtccttctcgaacaggtagtactcggccttgcggctcttgccaggattgcggaacgcgaacgctgagcgatacgtcttgccgccgtgctcccactccagatccttctccgcgcgcggggcgcagagatggtcccagtacgagaacgcgtcgactgacatcttgcttgcgtggctcggcatgatgggaaacgggtgcaggttgtccatgatcgtggtcttgccagccccgttggggccgaccagggcgatcaggccacccggcagcgtcgtcaggtccaccgtgacgctatcgcgcttcatgccgtcgcggatcccgtagaatcccgtgagcatcagtttcagtggacgcattcggacacctccgtaccattgaaggagtgaaggtattccggcggcatttccatgacgttgtcgtcaaacactggcagctcggcaacgacaggagcatcgcgttccggcttgccagcgattgcgcgctccagggagcgacgcgctgcggcaaactcgccggcggccatcttgatcacggccggccaatcctcaaggccagtgatggccctgagttcgagttggctccactgggaagccaagccgttggacgccgaccagatcaggtcctgcagctccttggaaggtgccacggcaaggaaggtatttcggccgacttcaccaagggccaaaaccagcatgtgaccgcgcttggcgatcaccgtaccgcggcccttgccgaacggctcgtacagcatgcactgcgtaaattcatgggcgtcggccaggcgcttggccatcaccgagcggtccatgcacgcttcttcaacgaagagccagtcgggaccggcgtggtacaagatcatttttgcactcctggaaaaggacggagtgcgccccagacgggaagcacccgtctgggtagaaagaaagaaaatggatactgcggggtcgatgcgtcaaggacgcggagaaaaccgggtttcggcagcctctagggctgtcggaacatggctcacatgttctaaggtgtgggcgtatcgctacgcaaacagatcatcggtcagccagtccatcgctggggcagttagcgatgacgacggcaacgccggcttggcgtccgtttccttcgagcctggcggcaccggaggcgcaccgacatcgtcttccagctccatgccaaccagcgccgttaagacatgtggcaacacaggctcgggtggggatgcatcggatgctgccgctaccggatcagccacaagatccgccagcacgcgatcggcaatcgactgcgcatcgttcgtctcaagcatcgagaggcagtccatgagcggattggcctcaacacccgtcaactcacaccagcgtcccagcttctcgggcaatgttgcggcccggctgatgccttcggcccggctacgaactgccggtagcacccgggcttcgagcttcacctcggcactggcgccaaagagagccgtgatggcctcccggtccacaagctggcggtgctcctcgttgaccgtccaacggatgcgcacgaacttgtcggcagcatcggtggccatctcggtcagctgcgccatatccggcgggccgtcgaagtcaatgcagacggactggcgcgccggtgtcgccaccagcgaggcctcggtccggcggggagcaatctgccagcgcaggtagcccttttccccaatctcaccatagtggaagcgcccgatggagcccggataggccaccaccctgccctcctgtgcccattgctgggcgcggtgaatgtgcccgagcatgaaggcatcgcaatcggcatcgaacagcgcgccaatggtgaattcgtagtcgaatccggccatcggcaccccgtgctcggtctggcacccgttgaccgtaccgtgggacacgccgatcgtgcgcgcgcccctcgatcgccattggtgattgacggtacccgcagccctcagatagtcggccaggtgatcgccgactgccgtggcagcacttgcaacgccagccgcggccgccagcacagccttattgaccgtcggcacacaggtgaacaccacttccggtatgccgtgctgtgctagcagcacgtcgatctccgcggtgtcgaagacgggccccaccgacggcacaaagtgccctgcgcatagtgcaacctgatggatgcgatccgcgacatagacgggatactgtgcgccgatgaggcgaaacaggtccagcgtgcccgggggctcgtggctatatgtgccttgcagcatcaaaacgggcatgcgtgctgtcagctggtgaactcggcgtgccagcgccgagagcgccggtgtgtgcgcgtccaggcggtggtcggtggaatccccagacaccacgccaacttggcacccgccggcaatcgcgtcatcgaccgcaaagccgaagcagcggtcggcctctgccaggtggccaggggaatagtgcagatccgagaagtgcgcgacaagcaggctatcgccttcattgtgcatggtatgacctccaaagaaatgtgccggcgtgcggcaggaaaagagaaagggaagccatatggcttcccctgacatgccggcacgaggctggcgaaactacggtgcgacttcggcagcgatcgcggctatctgttcgcggaacgcaagcggattggtcagcgctgtgcgcatttcgccaagcagttggcgaacgtcctggtcacgcttggtccagccgcgcccaaatgtggcagatgcgtagatgcggaactgtgcccggccttcctgattggccaggcccagacgcaccatcagatcctcgaactggctttccaggtcgtcgccgtcgacgggcacttgatgcgctgcagtggcatcaacaacctgcgacagcttcgtcgcttcatcgccctgcagaggcgtctgctccgttggctggacctcgtcttccaacgcagcaactgcctgcgtcgccatctcgagtgccggcgcacgacggtccgacccgtccagcagggcagcgatatcgatctccgcgtccaacgtgatgagccattgcatctggcgcaccgcccttccgctatcatcgatgcggctgatctccacctcctgcttggacatccagaacttgacgcccaccagcctgccgcgcgccaacgccacggtctgcatggcggcgtgagccttctgcaggacgtaaatcgaggttgtcggcatttcgatgaggccaaggccggaaatggccggcagcgcgaagtagaaactggccgacaggttgcaattcccatcctggtattgcgggcacatgtgtgggtcgcagataccgtcagggatatcgtcgtcctgtcgcaggatgatggtgcggccgccccaggttcgcttcgcgcgattggcgcgagcatcgcgcactgggggcgcgtacatcttgcagtaacgcctgccgtccggcccgtactccgagaagaactggcgaccgctctgcgtccatgcaacgagctgattgggcatattgctcaaccagtcgtcgaacgcgaagatgaccgggaatcgccagagacggaagccgttgccgtcgccacgatcctcaccgtagcgctgcacgatctcttcagccactgcggggttggcaaagtccgagccgcggcaggtgaaccacggcacgttcttcggaacaagaggcgttttaattccggttgcccgggatatctccaaccccatacgctcgaagctctgaccctgggccaacatccggtcatggatcttgacggcttcaggcttctcacgtgcagccttggtcagaaccttgatgccgggccggatcttgccaatgatcggtggccgcgtgggccgctcctctagcaggctccggcgtccgccaggttcgctgtaggtgatgggtgcatgcatggtacgtcctttctcctgtcaggaaagcgaacgacgtcggcccggatggacgcagcatgctcccgaaggcgctgggctgtgtcggccccgcgctgggtcgttgcggcgatgggaaagcctgacgcgcaggcttccgaaaagactggcggcgccattggcgcgccagaaacgaaaaaagcccgctccggattgcgccggcagcgagctttgctattcagaacctgcaatgccacgccccttccgggggcgtggcactcagggagcggcgcacaattgcgcgctgctcgatgctgaggacgtaaagtcgtcctcgtgcagcatggtcacgctgcacagcaacccatttcgcgaacccacaggttcggccgcaggttcacggatcggctcgacggctgccgttctgcccgggaggggcctttgagagagagctccacatgatcccgggctcgaacggtgtcagtcgcgtgcgctcacaaggaggcaccgcgagaacgcgtattacgagctgatgagggaagtgttcggcgaaaacacttagcacaagaaatatccacactggtagccaaccagtcggcgcgtgcgcatatgcacgacttgaagcagaagatggactcgccaggagtcagggtcgatgcgtcagtgacgcgaggtgtgaatgcattgtggcacagaaaatccgtcgcaaagaatgcgaaagctcgccaatttgccatagctttcaaagtcatcgagtgcccggttgtgtccgacaatttcaccctgagagagcgcttccgagaacatgaaaaaatggccgaacaggatccacccaaggtatcagccagtgggctcagacccattgagcgacacaacagcgaagaacggctaagccgcctcacgccgacgacggcttcagctaccctccacgcctactgctcaaagttcgcgcgcgacttcctggatgcacatttctactacgcttcatccaagttcgtcgtggcgcgtggcggcaaggtcaaggcgctggatgaagcgtttcgcgacgcggaggattggtatggcagtgcactgagctggctttcgaagaccgatcaggtcgagattcccctcttctacgaggagaaagaggtcaaggtctcccattccttcgccggccggctgctcagactgctgatgcagttcgaccggatttttgttgagacgctctacagccaggaatgcgggtccatctctgcggaccaacgcaccacgacaatccagatcgccgcaaagcggatcaccgcgattcaccaactctgcatcccggacacagacaagttcggacccgacggcacactgatttcatctcaccggagctcccccgatggacatgcgtgacatcgagcagctgcatgctcaatacgcccaaccaccccttacgatcgacatctctccggcgggtgcagcgacggcgccgcatcttggctatggcggcacttccaccgcaccagcaagggcctccacctccccgttcccgttcgcgttgcgcggcaatccccggctgctgtgggggcttggcttcgtttccgccgcagcgctcatgttcatcattggcacatctattgggaagcgggaatcgcgtgccggcaccgagcaggtgcagccggttcactccgctcccgaagcttccgcgcgtgttccggcggccgacggccatgaatggccgcgcaagaccaacagcgtccccgcatcggaagtagctcagagcactgtattgccggtatctggcgaggccgcagtggcgtcgacgtccgcagcatccgctgccgccgtgcccgcggagcaaacgcgggagcgatcaccagcggagccgaaggcggagacagtgaagcgatctgcggccccggctgcgcctgcccctgcgcttgcccctgcaccagcaccggcgagggccgcgaccgtactggccccggccaagactgcacagcagctgccgactagtgccgcgccggcgcgaaacacagcggcgcagcatgccaactcccccaccgacatcaagatgttctgagcgccatggaaaatcctcccatcttcagcgtgctgcgtgccggcatgagcatccacggcgacattgtttcggaccatggcttcacttgcctggcgctggtcaccggcaacattggcgcttcccggggcctattgcatatcgcggcaggcggtgtagtgcacggcaacgtcgatggcgagcacgtcattgtggacggtgtggtcgaaggcgatgtcgtcggtcggacctctttgctgatcaacggccgagtgaagggccggatcatctacgcgggcactatccggctgggaccgaatgccgccctggacggcaccatcacacgcattcaggcggtcggctatgcaccatccccacaaaaggagggggtggccgtcactgactctgctaccgaagcggtggagcctgcgagcagttgaggaacatgttccttccaacaaatcgaaaagctcagttccacaccctctctttcgagagcaaaaaggcccggcagaaattttcgccgggctttctcttttagtacatgcgtcgcaacgtcatcaactccgcctgtgtagaaacgtcagggaatgcgacccacggaaagtccacgccgctggcgggatctcgaaacgacacatacggaaagtcattggccaactgcactctgaagatgcgcccgcttccgtccttgccgcgcacttcgtacatggccccatgtactagatcgaatacaacccttccccgctttagcgtcactgagaatgcgggtccttgcacatatcgctggtccatccaagcgtcatactccacctggattgcgtgctgcctgaccaggctctgccactcatcgaagagtgtatgaaagcgctccttgtggaaatgcgccacaatgattggctgccgttgcataagtcgccccgcgactcgttgcccgtcactcccgatcgtggtacgacaggcattgcggccaggaaacgcaggtcgcttcgcatcagaggtccggaacagccatcgagggtatcgagaatagaaatcagtcagaatcattggcaacgagagaagaaaaaggccccggcactgccggggcttggtggacctaaaagcgactacttccatgccaaacatcggcatggagcgtcgttcgctttagggctgaacaattacgatctcgtcatgcaatgagctcgatcgcagcgtcccaagcgcgctgcttgagtgccgcgccggcaccgaaccacgccgaatccagccgattgcccgcattgcgcgctcgctgctggtgatcgacgtactcggtgacgctgttcaccagcccccaggcagtcccggccgccgattccagcgtggcaccacgaccgttgccctcgaagagattgagcacagccttcaggccgcgctcgttcaccttgtcgggaccgttcgaatccggcttcgtccacgggtacgtgaacaggcgctggaagaagcgttccgattcgacctgactcaccttgcggtcggccagttcatgcatgcggaccatgaagccatcccacgacgagatggcgatgcccaactcttccttgacagcgcgcgggtcgaactggctgcggtgcggcaccttgacggcgccgcgactgcggccaagcgcaatctgcagcgtgttgttgcaaaccacccgcaccgacgtgaactgggcggtggtggccaaggtgccatcacaggccgtggccagcagcaggtagccgcgcacctcgtcgacgccggcgatcttggtcgactgtcccgtacgcgcgagcgcccagagcttgcgaccttccttgagcacacctgccgtttcaagctggtagccaccgacctccgtcagatcacgatagaagtccaggatctccgagggctggacgacctggtaccgcttggacactgttgcaagcggcttcttggtatccgagcgaaacagcaccttctgctgggggaacgaatgaagcggatcgagatcgtgggagccggcgcgatacatcacgtcggtttcctcgattcgccagttcatgccagcagcgtccgcccacacttcgagcggctgattgctttcgagctggttgcccaggccgtgccacggggtagcgccgacataagccatggtttgaacgagatgagacatgggattgctcctgagaatgggatagcgcgagcacggccccaaggccggtcgcaggaaagaaatgggaagatcagaattcgcagcgagcaggactgcacgcgtgcggggcaagacatggcgctttccgtggccgcactcagcgggtccagggcaacacgccatcacggctacagcaagaattggaggtgcatgtgggcaagggataatgcccacagagacgtccccacagggttcgtccctgtgggaagttgcagaggatggccggcatgccggcttggtcgatgcgtcgtagacgcgggtaaaactcggttcggactgaacgtccttcagtgcgaacagagctttgtgtgtagtgcaaaggctaacgcaagcgtcgcgtccggacgaacccgaatgctcaggatatccacgcgtgatttgaagaagacgcccccagccagtggccgggggaaaatgcaatcatgcggcgagcgccacgggcacggcgacatgcgccaggcgagcgcgcgcatagtccagcgtgccgtccttggcgcgcagcggtcgggaagcccgctttactggatcgtggatcaggtaacgtctggcactaccgcggggctcgtcgatgagctgcgagaagccagcgtcaatgcaaaagtcgacgtactcgcgtccgctcatcacctggccggtctcgagacggtacttgaccgcctcggcctggcgcattgcatcagccagttcacgctcggcgcgcttctgcgctttctcgatgacctcgtgggcctcccattcggcctgttcggcttccgagaatccacacagttcaaacagccggcgtcggcgagtcatcgctgaacattggagaacgtcgacaccgatctcttcacgcagggcgcgcttcgaatccgtgttccagtccttcgggccgtcaaagatctgcaggaccgccgccacattgcgctgcatgactgcgagcgcaacgcggttcggccactcatagccataggctgcgcggtaagctgcagcggcacaggcctggcgatcgaactctcgctggctgattctccgcgattcccgctcggccttggccttgtccatgctctcctggaactgccgttggctgatcaacgcgtgaatccgcgcagccaggttcgtcaccggctgcgcgttctccgccgtcggcggcttgggcgtcgggatcgtccgcggtggcaggatgccagccacaaacagagcgtcgtcgacctccacgtcacagccgtcgtgcggcacatggcggagtgcggcgagcagcttgccgacattgcgcgtcgtgatcgtgagcttctcggcacgcgtggtccggcaaagcgcttgcaacacgctggccgacaatgccccccgtagcgcgggtacctcgatcaggggttgcatccagaggtcatggcggccgtggtgcgggttgtcgcggtaggtattgacgatgcagtttcgaaccttctcgccacgcatcagcgcataggcaacgtgcacctcatggcgggcattggggctcgcatccggtgcatacaacggcccgttgatgccgtagccgaatctgcgcacgaactcaccacaaacaaactcagcgatgtcgaacgctcccttctcctcaaaaaggtctgctgtctggaagagcggtcccgcatcgccttgagacatgtcgatggcttccgcggggaagtacgccaggcggccggcagcgaccacggcgccccaggaggcgcggctcatctcgtgcgggcgcaggacttttccacccacgcgcacaatgaaccgatccacttcgtcgaggatcatggtcaggatcgcgcgccgggtgcccgtcgggcgcaccgcaaaattgccggacgcaaggcgcacgaccgggatcgccccgcgctcgatgtgccgaacggagatgtcttcgacacgcggcagcgcgcggccgtcacggtcatcgttcaaaagctgcagcacgccggcgagcgacgtgcgattctcggcctgttggccgatgtggacaacgtacatggtggctcctggggcggagcacgccccttcggggacatgccccgaaagggttgaaaggatcggatcaggcgagcgcagctgcgcggcgtaccgggcggcttcggcgagcgaccacgcgtgcggcagcaacctgcgacaacaagtcaggatccgcaatacgccaaatttcgccgcggccaaggccgacctggttcgaccggccagtttggacgaacttgccggtgcccagcagcacagtcttcagatcggccggcaggttccaggcagccgacgcgagaatctcgtcctcggcaaggtcggcgtctggcacgttcaccgacagcgcgccgtagggcatgccatcgtcggcacagacgagtgagaacgccgcgcgcaggttggtggaatagacactggcgcgcagcagcacgccggcggggtagctggccaggccagcgccatagatacggtccatcgggaaactccgttagatggggagccggcccgacgggacgacgcccgcgtgggtggtttgaaaaacaaaaagcgcaccccaagggatgcgctgatgtcggagccgacgaatcggctcgtaggagaagggaggcgttcaggcgtcgcggtcaagttccgcgatgcacgatgaaaggccgaatacaaatggcccaaacatcacttagtccttgtggacacgtcgtccattgcggtccgcccagagcaggaaagccgcaatggccccgccaagaatcagtacaaacaggccgagagtcattctcagtctcctttagaaagcactgcgcctacgaagaatagtacaacaccgatgccgaccaggctcaagacgtccgtcaccgcgctgagggtccaaacgcggcccgaaccgacatagcccgcagcgccaatcacggctgcagcagaaagcgtgtgagcaaatcggcctgattgctgccgctggtccttggtcggcgcgatgaccgccttccacgcttgcagaagaaacgccttgcgttggcgccgtgcccgatcgacgcgatagctaccgttttccacgtgcagtaatggaattcgatatccgtcttcgtgagccacgatggcatagccttcgcctgcccccgttgcgcgattgacaagctccagcaagcgcgccggcaatgtcaccatgccggccgctggatcgtactgggcatgcccattcacctcctcaccagacgtcgatgtgaaggtcaccttgataaggctggtcatggcttgccccctcagctacgccgcccggccaccacgcgaagcgtggaaaccagattggcatagccatggtcggtggccagcgactccacattgacggtattgtcgcgccccccggtcaagtcatggcgaccgcgacaggttctgtaggacatgcgcactccgccttcctggcccgggccgtgctggatctcgacaagcagcgagtccgtatgcaaggcgaacacgtcgacgtcgcgacggcgctggcgatgctcgcgaattgtgtagtcccgcgggctaagtgccatgtcgccggcgaagcggcgcagcacacggcatgcgtcacggcgaaccgcttggcaggcagaagaattggtcgacgggtgccgactgaagaatgatttaggaagcttcatgatgtcctcaagaatgcgcgggacaccccttcccaacgggacgagtgtcccgcaatgggttggtccggctatgccggacagtgggtcgatgcgtcgatgacgcgggtgaaagcgcttgccgaagcctgaaagcttcggcaagccctctcgggcttgcgattgggatgggcctgaggtcaggcgagatcgaaaatcttgctgatggctcggacggtgtcccaagcttggcgctcggacagcaccttgccaacaagcaacttctgggcagtggtgaccaggttgggggcctcgccggcgtagccgatccggtcgacaaagaccgcccagccttccgaccaaccgcgatgcacggagacggtgagtcgttcacgcgcacccaactgtggccactggcgtgacgacttcgggccgtacatggcctcattgtcgtcatccatgaaattggcagcattgagccattccggctccaggcttgcactgcgcagttgacgacggacgtcatcggcgacttcgaagatgtacctgcccttcgtttcgatcggattgatggtcaggggagatgtttctgcagtgtcgaacatggctggttgcagttcgcgacagagcccccacgcgggagggtccgcgcggggagaatgaagggaatgggactccgaaccggaggccgttagtgagtgaggcgatagccgccggcacccgagacgagaaacagctgctcgccagagacgaactgctgatccgcatcctgggtcacgacgacctggcggccactgtccgtgcggacaatgacttccacgccatcgcggcggctcaactggttcgccgccgtctgcgcgatgaccgccgagacggtgcccgacagggcgccggccaggtaacggccattgccgtcgccgatgatgcgcgcaccaagcaccgcaccaacgacggcaccgagaacaccgggtacgccggtgtgggccgacataatgccgtccctgtcgacaatcgtgacggggcgaaccctgacgactgtgacagcttcagcgttacttgtgcgcagcgcttccgtcgcccggtaggtattgggcgaagtcggctgagcagcgcagccagtgaaaacggcgcagcaaaggaaaagcaggaagaatcgcttgatcatgatggcctcaacgaaaatggggccaacatgcccacgggcaggaaggcccgtaggtggggaaaaaagagatgtccggctatacaaccggaagtgtcgatgcgtcggagacgcggtaggtgcacctatgttagcagtgtcgagcgcgtttgtggagtcgttcaatccggcgcagcctacttaccgaagcgccgaatgcggcttccggtcagccgcattcggcgagacgccaacaccaactgtcgccgatcgcataaagaatcagcaatgcctcgccaacgcgatacggccgtccctggatggttaccgcaccgtgctcttcggaaagcaggaatgacgaatcactcgctacaaactcaagggttggcatcgatttgcatagttgctgcgctgatgccagcgtaaacaatggcaccacgaagccgttccaactgacaccgttccagaaggcatcgattgcgaagtcgtcgggtagccagtcgccggctaccctaacgggtcggtatttagaggcaaaggcatgaggatcttgcatagtgtgtactccaattcttccggaaggcagctacctgggctgtgttccggcgggtcgatgataggtgcgggccgaacgccacgtggggcgccgctgcaatgaatccaaaaaaaatgccatccccaaaacttcggggacggcgggttcaagcggcatggcgagaggcgcggctcgcgcgctgcttcggttcgggcaggtgatacccgaatcgcgcccaggcctgcgggtcaaccggcagtggattcgtacgccccactgccaaattcacgaacgcgccgcagtacttcagcgtccccgtgcgaaacagcgtccaaagcaagttgtaggcctgcaccgcgatcgcctggttgatcaccagcgactgcttctgcagcgcctctgccatcgaacacgacggcgcagtgtcggccttgtcccctttcgggtccagcagctcggggaaaaggtcgccgacatggggcaagcgctgcgccgccttgccgcgcacttggccgagaatcacctgaccactgtccgactcgttgccgcagtcaagatagtagccacctgtgccacgcttcatcgctccaaggatcgccttgcgggcagcccgcgtgtcaacacagccaattgccatgtcgcagacgaagcgatcgccgctcgcaacccgacgcgtgtgcgcttcccagcgcgtccccatcaggttgttcagtcggttcacgatcagcgtggccttgtgctggcccacatcgacgggatagaagccctgacgaccgatattggtctcgctgacggtatcgtcatcgtagaccgtgcaatcgatgccgcccgggtggcccagctccagcatggcgtgatgcagccgcgccagattgggtagcaaggcgctgccggtgccgccggcacctaccactaccaccttccaggcacgcgtcgtcatgttcgcgggaatgcgatgctcgaaggtcatgccagcacctcctcgcgcgccgcggcgtaccagtcggctggaaccttctccacgttctcgaaaatgcccttggcgcacagccgcagtgccatcgaaggcgttgccgcgtcgcagttgcccatcacgaacgcaaacttcacgtcgtggcagtcgtcgtcatcgtcggtagacgagaagaacgccgggtgacgcccatgcgagtggcagtcgaccaccagcacatcgtctgcagccagtgggggacgctcgtacttcaggtgcccgccgctgtgctccaggatctgcactggcaccagccggaacgaagcgctatcggcattccagaccacccacccaccagtttccttgggatgcgcggcacgcgccatcgcggcgaactccccgatcaactgagccgggatgcgcccgcagcgcagatcggttgtctctgccgcctcgccgtatggaatggccgtgcgatgctggaaagcgccgaggtggcggacgacgctcagccagggccggacgatctcaaggaacacgccgttagccgcaatgagcaggcgctcgccggaccgttccatgggcgcgagcgctccgaagcgcggcaccatcacagaaggaaaggattgctgcagggcagcgtcagcaggattcatgatgacttttccagtttgccggcgatcagatccgccagcttgagtttcatgggaacgaggacttgcttggggtagtcgggaaactgcccgtcaagcatgtccttccagaaggcataggcgccgcgctcgtacgtcacgcgcttgctgccatggttgggatgggtaaatgccgagttgaagaatccggcttcccaacctgcgattgatgccacgtcgatctgcttgggcacatgggctgagccgatgcagatcttcccgtggtcccaggtattgaagtaaggcggctcgcaaagctcgctggccggtacggggcgctcgtcccctctcagggcgaagacccggaacccggactgcgatgcctggaacacaagcgcggggtgtggcacaaccgcactgcgcttcccgaactccttgcagtcgaagaaaacgcgacgctgcgccgcgggacaccaccatgtcaccgcggtggggctgatcgacagcacgttgggtgtgaggaactcgccgttggggagcgaggcctccgccacttcacggactgcgtggatcaacgccatacggttcagcggtgtgccggcaccaatgacggggcgacccgagccatccggctcgatgcgatgggccgtggcgtaggagaactgccctggcccttgcccataaagcaaaatggccccttgcagggccacgtcgtgcgaccgcgtagcggtcaggatttcggccatatggccctcctagtcagaaatgagtgtgagaacgcgatcgagcgccgcgatggtcttcagcatgccgtccagatccctgaactgctgccggatcgcctttggctcgcccgcaatgggtatgaagcattggaacagcgttgcatcgccgctgcagttgagcccgtcatacagatcgtcgagtacctgcgtgacgtagtcggactgcctataggcgagcgtggccgcggagtatgccggctcggcccactgggatcctgcaacggccgacctatcgccctgcctcttaagggtcaggttcagttcggccagcgcgacacatagatccttgacccagccattgttggcgcgagacagctcatagagcttcctgctaccgaatgctcgcagcttgctcgacgccggatagccgtggcaggccggtggcagtacgtcatccggtgcgagttccggcctaacgacagacggcaggtatcgctcgatgtcgccttcatccatgtcacaactctcggcaaggaattccctcgcgttcttgtcgtcggcaagggtactgtcgtactcccagtgccaccgcgcaaacaggtcaagcagggcttcaggggtgcgcaggaagagcgacttcgcgctagccgtattgatcagcgacatcgcggtgtagagaaggtgcgggtgcaccgctcgcagcgcgctcgcgcgcgcttcaccaatgaagtagacgtcgtcgccgggcatgtcgatggcgagatacagcggcgcctcgatctcgtcctcccagccgaattgcatcaactggtcctttgcagcgcctatgtcgatcagcgagaagccgaaactcaggcgcttgcactcaggtgtgcgggcgcgcagccacgcaaacatggcctgggcgaatgcatcgcccgcacccgttggagtcgaaacatcgttcgcacgcagcacaccggtggcaaactgtgcacggacaaggcccaaaacatcgacctcatccccgaaggtaagcagcccgctattcggaaccccagcagggatggccggcagcgtcagaaaatcatgggcaggtcgacgtcgggcaatgggatgctgtcgcgcaggcgtccatgcgggttgtcctgcatcgacctctggaacaaacgaccgaggatcgaacagcattgttgagtctcctcagaatgtgaaaaaaccgccctttcgggcggtttcatggtggtagcgaactggccggttgccagtgctttcatcaggtcagattcgcgcatgcgcgcccttggcgccggcggcgcgaacgaaggtgaagctcgcaacctcgcccttgacctccggaccatccaccgaggcggtggtcagctcgggatactgagccgaatagatgtcgcgcacctgctctggcgtgaacgccggaccagggtccacaaaggacatgccgttgtaggagaactgacgcagcaacttcttgatttcgagtgccatgtcggtctccttagagcagggatgccagatcagtaccgaccgaggacggcgcactcaccttcgcgtccgcttcggtctgcgcggcatcatcggcatccgcatcatcatccgaagcgctttcgctttccgacgccgatggcgatgcggccttagccagcgccttcgtcgcattggacgattgcgtggacttggcggcatcgagaatcgacttcgttgcctcggcctgctcggccagcgagcgatgcgattcgctcacactcgtgacggccgccgcgaactcggcatccaggtccgcaggcgttgccgacagcaccagaggcgacgtgagcgcggcatccgcggcattcttgatgactggcagcacgacaacggacatgacatcgccatgcatggacagcgtaacaacaaccttgtcgctcgcgcggacgagcgggaccaattcagtgaacatggtgaatccttttggggaaatggggtgaggcagggcgccggatggcgccctgcgttaaggcagagtgaaagtgatcagaagcccaggaccttgggcaccttgccggtgtagtcaaagccatcgacagccagcaggccggcaatgacttcgggtttcggcttgttgaacagcttggcaaagctatcgcccagcgccttgcgaatgcccagttcgtccgcgagaaccttcatctcggacttggtgagcatctccaggaagtattgcgacttctgcaggctccagtgcgcgcgcagatcgagcttgtggaagcggcacagttccttgaggttcggcacctccatgccgtcaattgccgcgacagtcaacgccacggtcagttgctggcgcttgccagcgtccagtgcatgcaccgccgtcaggcagccttgcagcgtcgatgacgccttctgctccgtcagcttctcgaagaacttgctcatcttgtcgccgccgatgttgcgtgcgaggccattgagggcgatcgagatcaggtaggcattggcctggtccgcgttctgcgcgacttccttgcgcagcgccttgcgccagagatcggtccggtagttcttgaccttctccgactcgctgatcgaggtgacaggcttctcggctgacgccgaagacttgtccccgcccttcgcagccgcgggcttgccggaaccggccgggccccctgcaggcttttgcgccgccgctttcgcgtcgcgctccgccttcaggcgtgccgccaccttccgctggttgcagacggtgtcgaagcactgaccactgtagaccttacccagtgaatcgggcagtccgctgacggcggcaccgaagttctcgcaaccgtggcacgccttggcttgctcctcccccaccccagtcgagccatcgacctgaagctggatgcgggtgtggttgtcgccggggcgtacgatgcgaatgacctggtactcgtccttgagcccgtagctgatgctgtcgagcttgcggtcggtcttctcggtatagcaggcgcggttggtgcagttgcccgtggcaattgcctcgccgaacatctccgtctgcaacgaagagttgtgctggcagcttgcgcattccgtcttgtcgaagatggctttctccaggctgcacgcggcagcctcgatggtcttcttcaactcggatacggacttcttctcgctcacgatgaccggcaggagcttgtcctgcgtggccttggcgagcgtcgccagcaattcagcgtggccgagctggatgacacgcgtgttgagcgcattcaggaccgattcgctgcagttcatgagagccaggcgcttgtccagcgtcgagcgcgaccagccaaggaggcgggccgcttcgtcgcggtcgccctgcaactggcctgcgatcctcgatgctgccacggcctcctcggaaggcgccatgtccgcacgctgcacgttttcaatcaacgccatgcggtcggcctcggcgtcggtgatcaccttgagcgtgacggggatatggtatccctcgccatgcgcggccagtgcggcgcgatagcggcgttcaccggcaacgacttcatactcatgcccattttcatcgccctcaacgggacggataagaatcggctgaaggataccgtccacgcgaatggattcggtcagttcagccatttggacaggatcaaagtacttgcgcgggttacggccaggacggatcttgccaatgacaacggtggggttttgcattttgggttctccgagacggaatgggaacccgttgccgcaccgggaacgtggttcccgatggggtggaaggatggactgccaggctatgccggcgaccaccatactgcagaagctggcaccaaaaggtgcggggtcgatgcgtctgggacgcgaagtgtggtgtgaggatactcgaatttcgtctcgacgagcaagatttgatggccaagatggctgcgcatccgatgcggcgatgtggtgctaagcctggagcgtgccccggacaccgcctcaatccaatctgatgcggcccagcacgctacggccacaggcttcgcgtgcataaaaaaaaatggcccccaacgagtgggggcctgagggaacgggtacaacttgagaggcaattccgtagcggggcgcgctacggaactgatcttaaagtgatttaagccagaggcatcccccgaaagttggtcaatttcgactgcttttcgctggaatgggtccaatcggcctggccagcacgctggtcaccgcgccaataacctgccagccgtccatctcgctctcggcgatgccatgaacgagacggtccaggcagacgacttccaacccgtccgcctcgatcgtgccgagaatgtgggcaacggtcgtgccacgcgtgccgcgtcgcttgatcgttgccagcccctcgccaatggcgatgctgcactcgtttgctttcatgctgcctccttgagcagttcacgttgatcccgggccttgcgaccgtgcagcttcgcgagatcgtcgacaaattcgtccaacagcgtgtccatgtgcaggaacgcctcgtcttccagttccggtgtcgcccagtccaggcccgcctccatggcatcccgtttgtgcgccaccatctggtcctggtagatatctagactcccgggcagatggaaatagaccacctttaactgccccttccggttccagcgcagcgcgcgccgcatcgcctggtactcgatgcgccacgtccacgaacggtcgtagaagagcacgtaatcggcattgggcaggttgtagcccgcccggcccgacgccttggtgcacaacaggcccgtggcagtgccgccgacgaaacgcttgtccttgtcggccacgcgcttcgcaatcggaatgccgccgtgaaacggcaccgtctctacccccttcgccttcaactggctggcgatgaggttaatgacgcccggattctcggcaaacaggatggcctgcttgccctccccggcgatggcttccagccgctcgatcaccgcgcgctgcttgctggtcagctgccccagcgctccgacaccatccaccccatgctgcgggtagttggcggcgaagtgcacggcacggatgcgggccagaatcgcgatcaggttgttggacttcccttccacctttcgcacgtcccggtaccactgggcgaactcgtcggccgtccgcagatagaacgacaagtgcgcaggatcccagtccgtctcgaccacctcgaccgcgggcggcgcaatgcggataaagcgggctacatcgggctcgcacaccaaccggcgcttcacgtgcggcgccagcatctgccggtaccgcggcaggttgccgatcttgggcacttcgcgcttggccccatcctgcaggctttcggcaaattcccacgtcacccattccagcaccacaaagtcgctgcggaaacggtcaatgccgcgctcggcatgctgcactgaagcaagccagttcgcttccaggtagccacgccggtagccatatggctgggccgccgtgccgtcaccgcccgtgaacgcgatcagtccgaagatatcgcgcggatagctggcaatcgggctgccggtcaggatatagcgccgcttcgccgacagctgccagagcgcgcggctctggtcgctggcagggttggacaggcgctcaccctcatcggccaccagcaggccgatgcgacggcgcagccggtgcgcgtacgtgacgcggcgcgaggcctgccggtcgacgggcatgcgcaagcgctcataggcgatcagattgaggcggcccagatgcaccagatcctcaggcgactgaattacgtggacgtccgatgctggcatgacttgctccagttcggcacgcatctcggcgatcaggcgtgcctcgacaacgatgaggccgtgcttcacgccggacagcaggatcaggcccgccgcgagacgcgacttgccgcagccctgctcccacgcggccacagcaccgttgggcttgagcagcagctcaaccaggtcttcctgttggaattgccagtccagccaccggtcaatgcccagcgccagcagccgcttgcgcagccgctcggcctgcccgggatagcgcacggccatcccctcgtgcacgatctcccacgcctgcgccgatttctcgacgctgtagcgggtggtgatctcgtccaacgagacgacataacacttgtcccgcaccgtgtactggtagcggccgtcgggctgccgatcgaagcgcaccgtctggccggccttgataaccgggccgccccaaaccgacgagtcgaccagatgcgtcttcgtggccgtaccgacgatggtatcggcggcgcctacgccggtcgtccagaccgcatggcgcaagggcaacgcctgacgcatgctgcgacgcagacgctggcggaagtgctcgagaaagcccggtgcaaactccggctcaccgccggcagacttcaccatggcaacgagcgtccccaatgccccgatcggatcaggctgcaccagataggcctccagatccagccggcccgtgcctgcgtagcgaaagccacggggcaggcgctggccctccagcgacacgatgcggcgctccagcacacgattgagcaccatcgcctcgacgaacccgcactcgaatccgagcacgatgcggcgcccgtcatgcgagatgcgtacccgtttctgcgaggtcaccggacgcgtgatagcgggcccttcgtcatccagcagctggtggccaagccgcggttcgccatagagacgatcctcggcctgcagttccagcgcaggcagcggctcggccaaatccgacacggcttgccgcacgaaatcgcgggcgcgcatgcggtagcgcgcgaataccgcaatggaggtgcgcacctccgccccttcctcccggaaggcgctcgttggcaggtcgaacacgccgaccacacgccttgccgcatcggcgaagggttcgccgtggccgatcaccaggccggcgaacttgtcgacgaaggttgtgggcagcagtgccaccacgatctgcgccgcgtcgagtgcctggtacagcccatattcatgactcagggcgctggtgttggccccaaatcggccccaggtagtgcagtcgtagggcttcaggtgcggcgactccagatggatggagaacggcgggttaatgagggcaacatcgaagcgcgtcggatggatttcctccatgccggcgtgccgaaagctgccgtcaaagccagcagcctcgatggcatgctgcaccgcctcgatcgttggttggtgcacgtctacgccatagaggctgtgcgtgcccgggtccgcgaactgcagcaggcgggccgagccgaccgaattatcgagtatcgacaccttccggttaggctgccagtgggttaccgcgccccacatcaggcgggcaatggcatcgggcgtgaaaaactgcgacagatggcgctgacgcgccgcgtgtagctcgccctggtgcgcgattttctcggcctgagagccaaggctgacaagcgcccgcaagggcgcataccaagtattagacatgatgggttccagaaaagaaaaagccccgtcggtgaaagtcactgacggggcgtaagggggatgcaacccgtggtcggctatgcggactgaggtgaaatgccgacgtgccgctggacgaacgccagaagcgtgtcagcgactggcgtggcgaagcgcaactcccaatactcgttgtactgaatgacgtcgaggcctgggaaggtgcgccgctgctgcgactcaaacacatcggcgggatggaactgcgcgaggcagctcgccagaacggcgtggccattgcggcgtgcaaagaccgcgagtgcagcgaacgcctgcgtaacaggctccaacgagccgaaatgcaattgacgcgagggccgcgaggcatcgctgaccgtctccgatatcgcaatgagcttgagccgaacgaagacggtggagcggcgcacggccgaactgctggccaggccgaaggcacgaacgagtgtggccgccatctgctgctcggctttctccggcccatcagcctcgtacgtgtcgcgcagcaggttccagaagcgatccaggtccggcacgacaccggcccggatggcctcccagatattgggatagccgtcgacagccaggcgtgtttcgtcgatggcgatgggggcaccgtcgatgccaaactcgacgccggcccgctggatcatctcggcgacctgcttgcggcagaaccgcttgaggtcagccgacgctggcgtcatagcttggaatccggaaagggtctcctctgcgcggaatgcctcaatgcgtgcgttgtacatgtacttctactccaggaagacgaggcgcccttaggcgccacacgtaaaagtttacatggggcctacgcggcttcctgcatgaaggcctcgccgtactcgccgaggaatagcatcaaatcgtctgcaacctggtgagagaccttgaactcccaggcgtccttaaagaacacgatgtccagaccggggtagctgagcttctcgcggtagttgtactcgacgtcgtgcacgttgacctggctgagcgcgcctgccagcagctgatgacccgccttggcggcaaaggtggcgaggccagacaggcagtctgccgtgctctggtagctgtagtagcccaccttgcgcgccgtccgccgatagcaggcttcggaggtgacgtgcttgcgcaggaccaccgccgaggcggtgcgcttgacttcgcgcttgcggttgaggccgaagccggaaatgatccgctgggcagcctgctggtaggccagctccgcgccgccatggccgccgtagcggcgggccatcgatgcccagagcccgtcgatgtctgggaccttcccagccctcagggctgcgtcgatatccagcccagcgcgcttgtactcgtcctcgtgggcaatatcgagacgggcgccctgcggggcaaactcgcgccgggcgcgattgacgacgccgctggcgaccgagcggcagaacttctccagctcttgcgccgtacggtattcgctacggagttcaaccgatcgatagtggtcagggatcgcggcgacggtctcgcgctcgaaagctgcggccgcggcatacgcggcgtgggctgctttctgggcggcgatgaactgctcaatgatttccttgtacatggtggtctctcaagaaatgtataggagaccacccgacgggaggtctcccgaacgggccaataagggatagcaggctgaccggccgagtcgccgatctcgtctaccgtaaggctggatcagtggaacgccagcgccgggccggtaggcatcggcacgagacccagcgccagccagtgcgcgaccggatgatcgggaaaatccggaatcgttccaagtcggtacagggctggcacgtccagcagctcgcagtcgccatcccgcagcaagcggcggtagcgatcgctcaagcacagccaggccagttcggcccgggcggcgtgatcccactgcgcaggcaagcgcgactcatcgaacagcgcatggcctgccgcattcatgcaggccaccacttcgtgatagcggccgaaatcgtgggggaagctcctgcgcacgaatgacagcacttccggcgcgtgcacgccgaagatccggcccagttggcggatgtacaccgcgcactccattggagagcgcttggcatagtcatcgctgccgacctgcgcgcattcttcttcccacggtgcgggaccgacttcgatttcgaggaatttctggaacatggcgtttccttggatgtaacttggggaaacgccccaccggggagcgttccccggtgggtagtggattggcggctgaccaggacggtcagcccgcagtggcaggcttctgatccagatgcagcagcttcgcgagaagccagctgatgagaaccaggaactcgatttcggcaacgaggtgcagctgcatggcagcaaggcgatcgtcaccagtggtcacaaggaagtacagcgccgcgaacagattgatgacggtcgcgagaacagccagcgtgctgatacgggatgaaatacgcatgagaaggctccgaaaacggggccttccccattgggaaaagccccaatgggtgaaaaagcagatggccggtacgccggcagggtcgatgcgcagtagcgcggagagtggacgaatcttaccgcgcgtcgaacgccgggacaaggaccgaaccgcgggccacgcaaactcagccgcgctttgccccgatgcgatctcgtcggttggcctcgcgtagccggtcgaccacggcccagcgccgctgcgcaacctcctcggggttctccagattggagaagtcaggcaatgggccatcgtcgaaggcctggtagtcgtcggggatcttgcctgtggccttgagttccgatcgaagccgcttcgatagcccgtagttgatctcggtgatcgccacgtagtcccaccgggcgggcaacgcttgttccgaaaaccatacctcgccctcgcctggcgcaaccagcgccaccacgtcatagattctgcccgccggcgagggcacggcccgcacttcgaagcgcagcacctcgctacgcggatgccagaagacacgatccagatagcgccggaaggtgagtgcatccatcagcgcgatatcgtcgtaggacggatcgcccggtggaatggcttcgcgctcgccctttgggcgcgcgccgagggacacctcgcggaacttgagaatggggagctcagacatggctttccgtgaaagacgcggcaaattctaaagctttcgccttcaggtgcggcggaaatcagcctgagaatgatacgcggcgcaacatgcgcgccggccgccttgacttctcgacggcctcggtatcttggatgtaagagcaatccaaaccttcccgccatgcgcttctcttgcctcgaacgccacacccccatcgacttcaatacccgtcgccaggccgccttcgcgcgcaaacagcagcgcgagcgcgacaggtacccgctctttgcggatcacgtggccgccgagcagcattctcccgacgaggaacttgcccgtcggcaacggcgctccgacaaccttgaaaggacaacgcgcgccttgcacgcacgcgtctggcgagagaagcgcgccatctacttctcgctctccgatgaacaacgtgcggagatccgcgcaaagtggaaggcatggaccgggcctacaaccgccctctacttcgcctacatcgtcgacacggtcagtggcgagtatgagcgacgctcggaagccgcacgtgcagacacactggccatccgccgacgcgttctagcctcgctgcccgagcaaactgcattggagatcgcctgatggtccccaccgacgaacaggcttccgttgtcgacgcggtcaaggccggcgggccgctgaaagtcaaggcgtatgcgggcgccggcaagacgtcgacgctacgcctggctgccgaggcccgcggccgcgcgcgagggctgtatctggccttcaacaaggacatcgccaacgaggctgcccagaaattcccgcagaacacccgctgccgtaccgtccactcgctcgcgtacagcgccacgccgccggaactcacccgcaagctcaagaacccggtcgagccgccgcatcagctcgctttgcgctacggtctcgccaagctgcgcctgccgacgacgatcggcaaggatctcgaactgagcgccagcaaggtcgcccgaatagtgatggacggcgcggcgcgtttctgccgctccgcacaggccgagcctcttgcgtggcacattccagtggagtcgatcgtgaaggaggaggaggccgagcatctgcgcgactcgctgctgccctacgtcaagcggctctggggtgaatacctcgaccccgcttccccgtcagcgatcgttcacgacgtctacgtaaagaggtgggagcgcagccggccgcgcattggtgccgacttcatcctgttcgacgaagcgcaggatgccgatggcctgatgctgtcggtgctgcgcgcgcagcagtcccaggtcatctacgtcggcgacccgtaccagcagatctacgaatggcgcggcgcggtcaacgccatggagcatattcgtgcacctgaatgcgctctcaccgaatcgttccgtttcggcccggccatcgctcaactggccagccgcgtgctgcggctcatggacgaggaaacgcccgtccgtggacaggaccacgttgagtcccggatcctgcacgactcaacgccaggacaggatcgcttcgacgccatcctgtgccgcaagaacgcgacggtcctgacgcaccttgcccagggcatcggccggggcgatcgcgtggcggtgcgcgccaacgtcgacgagctccgcgcctttgccgacggcgccgagcagctcatgcgcggccagcgcatcggctaccccgccaccctcgccctgttcgaaacgtgggaagaggtccaggaatatgccgaatcgttcgccggccgcgacctgaagcccctcgtcacgttgatcgacaacgagggcgtggactatctgcgcctgatcctcacccgcgtctcgccagaggatgaggccgactacatcgtgtcgaccgtccaccgggccaagggcctcgaatgggagcgcgtgcagctcgccggcgacttcaagttcaagaccggcgacgacggcgaactcaccatggcaccggaagagatgcgcctgctttacgtcgccatgacacgcgcgaagcgcctgctcgatgtgagcgagatccggcgcgacctctacaccatgttccgggaagccggtgtctaaaggagagaccatgatcaccgtgcggattggcgggaacgagtacccgctggatgaggttttggaagatcccggccgctacgcgcgccacctcgagcgtgccaagacgatccagggattcgcggaatgcggctgcgcagagggccggccgcggcccaaactggtgatccggcgacaccgcgatattttcctgctcgcgcgctggccggaacaggcgttccggcacgccgaaggatgccccttccaccggaagacccagacaacgcccggcgccgccgacagtctcgacgcatttcgcatgcgcgatggccgccacgatatccgcctcgacgcctcactttcggtcagcacccacacaccggccaaaaccgtccagcgaacgccgaagggccagttcacaaagccgcaacggcgatccgcaggcctgctggcgctcctcgaattcgcttgggagcaggccggtcttaatgtctggcctggtaccggtgcccgcagctggaacggctgctggtcacagttgacggccgaactggacgattgcaggatcaatggcaaggacgccgacggcctgctgcacgtcatgcagcggtgggacccggcgcggaagtccgaaatcctggccgagttcgaggcgtggcaggctaggctttcgcctaccgccgccgggaatccccgcggcattctgatcggcgaaatcgagtcgcacgccgccacccagtacggagggaaggtcgtcctgcgccagagcacgcagcggttcttcatgtcctcgggactgtacgaacgcctgcaggcttcctttggcaccgcgctggccggcatcggacgggccgagcaacggtgtgtcgctgtcctgctcgttgagaagtcccgctcgaactacctgacggtcgtcgatattggcgccatgctggcaaaccggcagttcctgccttgcgactcctcccatgaggtcgccatggccgatcacctggtcgctctgcgccgggcatttcgcaagccgctgcggcatatcggccgagcggaggtacaccccgacttcgtcctgaccgatgtccagcccgaaacggtcatcgaagtactcggcatggccggcaatcccgcgtacgacgctcggacggcgagcaagcgccagcactaccagactgccggcgttccatttctggaatgggatgcggtagccacgtcgatttccagcgtccgcgtgccgccggctggcacacgggcagccgatgcacgctgatcggatcccgatcgccgacgccctgtatggcaaggcgctggaactggtgcatcagcaccgcgccgcgtcagttgcgcttctggagcgccatctcggcctcgggctggacatggctgaagcgctgctgcaacgaatggccagggaaaccacagccgtgcgacgcgtgccgagcggcctgtatctctacacacacggccccatcggagaagagttggcggcactccacgggttcgcgcaggaggtcctcgcagcgctcgcaagcgacagtgtggatgtcgccgatctgcgagccgctgcaggccgctacggtctcccggttccgcgccaggctgccccaacgcgaccgccgcgccgccgctgaacatggctcaggcgtccacgacctgagccagacaaagcggatcgtcctcacctcgttccgtcggccctactcggcgcagcggatttcgatggccgcatcccttgcagatgaaaaagaagcctctctcgtccagttctggatcggccgccgaaaacatcaccgacagccggcattcggtgcaggtccacatagcagtcccccgtcttgacaatgcccaccgcgcgatacgctgactccaatgtagccgcgcacaagctaaccagccagcccaatgaaacctgccgcccctcatatctccccgaagacacctgccgctacggacatcggccgcgcgtcgcagccgcactcgccagtcagcgtcgggcgaggtgtctgcgagctttgcggctcgattgcatcgcacctccacgtcgaggccaaccggcccgagcgcgacacacgaaccctggacctgttcgaggaccaccaacaatgagcgaaaacacaaagatcgaatggaccgaccacagctggaatccgtgggagggctgccagcacgttggccctggctgtgaccactgctacgcggagacccgtaatgcccgctttggcggtggccaggcccagaactgggggcccggcgccccgcgccggcgcacgtccgccaccaactggcgcaagccgttccgctggaacctggcgcacgctgccttcgccgcggtgcacgggcgccgccagcgcgtcttctgcgcgagcttggccgatgtgttcgacaacgaggtgccaatcgaatggttcatcgacatgctcgatgtgtggcggcagaccccaaacctcgacaagctcgtgctgaccaagcgcatcggcaacgccatgaagcggctgggcgaagcgttcaatgcactgatgctgcgcgacgactgcgcggagaatcccttggtgccgtggctggccacgtggatcgcaggcaacgcacccgcggatatctggttgggggccacgatcgtcaatcaggccgaagcggtacgagacattccgaagctgttgcgtgtccccgccaagacccgcttcctgtccatggagcccctgctcggccacgtcgacgtgttctcgacaatcacgggcgagctgctacacacgtccggcaacgattacaaccctggttcgatcgactggatcatcgcaggcggtgagagcggaagcgacgcacgcccgatgcaccctgcctggtcgcgcagcttgcgggaccagtgcgcagcggcgggcgtgcccttcctcctaaagcagtggggcgagtggcataccgcttccgtgctcacgacctctggcgagccggcattccgaacgttcgagacgtttgagcaatgggtaaacaaggccagcacctgggtcggcggcggcatctgcctcgacaagcacggccagcagctacagaagggagacgatttcatccgagcacgcgacgaatgccgcttcccagtcaccgtcatggaccgggtgggcaagaaggcagcaggccggcaactcgacgggatgctgcatgacgctttccctgtgacctcgttggacgtggcggaggcctgccaccgcgccctgggtcgtggagcagtctgatgcgccaactagacctgttcgcacacgtcgccgcggcgtttgcagacgcgtccgaagatgggctctccaccggcgctctctacgatattgtggcgcgttcggcgggcatcgatcacagcgcggccacggcgcgcgttccgatcgggactgcaaaggcactgcatagcccattcaagcgtgcggttcgctggcaccagcagacgctcaagacgctcggtgttgtcgagcgtgtcgccgatcgcacgggattctggcgcctcacgcagccggtcaccaaggacctcgaccgtgcagctgacggcgtcaagctggtcgcgttcagcacgatgctcggcatggccatctgggctcgaaatgaggatgtgtttcgaggattggcggaacccatcgccttgtgcgtcacgtcgccgccatacccactgcggcaagccagggcatatggcaatcctacggataaccagtatgtcgacttcatctgcggggcgctcgagccgatcgttgccaatctcgtgaccggcggcagcatcgtcctgaacatttccaacgacatcttccagcaccgcagtcccgcccgatccctctatatggagcggcttgtgctggcccttcatgaccgactcggcttggcgctgatggaccgcattccatgggtgaactacagcaagccgccgggcccgactcgatgggcatgcgtggaccgtgtccacctcgcaacggcatacgagccattactatggctgacgaacgatccaggccgtgtccgtgccgacaaccgccgcgtgctgcaggcccataccgaacggcatcggcggctgctcgaagccggtggcgaacagcggtcagccagttacggtgatggtgcctatcggatccgaccccagtcctttggcaatccgacatccggccggctttcccgcaatgtcgtcgaacgcggccaccgctgcgccgacaccctggcctaccgcagggcggccgcgacgcttggattgcccgcgcaaggcgccatgcagcctaccgccatcccggacttctttacaagattcctgaccgagcctggcgacctggtcgtcgatccgttcggcggcacgatccgtacgggcctcgccgccgagcgattgggcaggcgctggatcgtcacggaatggatcctccagtatgctcgcggcgccgccgagctgtttcgtcagtccgacggcttcctgatgcaccccgccctccaatgggcttcccaaggtcgatagcaatgcagcaccacgacaacgaagacagagaatttcccgagcccgagaccgtccttgccattcggggggcaatcgccaccggccggatgggcggcccgatgggcgagcccggccactggctcaacgagttctggcaggtcggcgcggcgttgcgtgatcacgctgagatcctccagggtgtccagggcgcaaatcgaagagccttcctgagcaccacagccgactatctggctgccagcgaaacaacttctgaacacgccggcgaccggaactgaccgagccccagccgcgggcaggcataattccggcatttttcagcactggatctcgccatgcctagcggcctctttcaatgcgcgcactgcggcggcgcgcccacctacgtcgccggccggctccaggccgtcatcgcctgcgacgaatgcgggatgtcaacgccgccggtcgagaacgatcccaggaatagggacgccgccttcccgcgactcagcgccatctggaacagccgcgtcgaccttcgcccggccgacaaggaagccatctccatgatcgcccggcgtgcgctgacctcctccgacatcccctatttcctcaatcttctcgcctccacaaccagcgactgggaagccaacggaccgatgttcgcgacgatggctgcagcccttacccagcccggctacgagttcaagcacgtcggcccgcccgaaactgttctctcgcaagccgcccgctaccagaagctgctgcagcgcgcgaaggtcatccatatcgatggcgctccgatggtgcgctttgagcatgtgccggccttggccgcggaagtcgcggaggagggtctggcggatcaggattggccgctcctcgacatggaagaattcgtcggtaaggccatcgacagcctgccggatcattggcagccttgactttgcccagcggcgggcaagctgaaggcgtatccacttcaacggaattcccctcagatgacccgccagcttctcgcagcagtcgttctctcccttgcatccctcacggcaagcgcacgggacacgggacaggcctgtgctcacgtcctgcctacgggccaacccacgactcaaccagcgggccgcacgcagttgctgtgctaccgcgcctacgccgttctctattcgagccagacacgcaccgcgctgtggtctgccgagcgtctcacgcgggaggccgtcgacgccgcgcgcaagctgccacgcgacagcgacttctacgaagaggagcgactgcccgaagccgaccgcgccaggctggccgactaccgacgcggatcgggcatggatcgagggccccgagcggcgacttcccggacaaggcgtcccaagccgagagcttcagcctcgcgaacgttatcccccaacacagcgtgtcgaaccgccgcacctggagtcacatcgagacgtccacacgcaggctggcccgccagcacggtgcgatccaggtggtgaccggccccgcattcgtcggcaccccgaggacgctgggccacgtgcacatccccgacttcatttggaaagcgatccacgtgccaggcattggcgccgccgtctaccttgtccgcaacgacgcgacgcccgcgtacagtgtcattagcgtcgcagaattgcggcactttgcagggatcgacccgtttccgacactccccaaggccatgaacgccacggcgatggacctgccccttcccaccccgcaccctggtgagaaggcggcgcgccgcgtcgcgttcgcatggcttgcatcgggcgaagccgccgcggcctcgcgcgcgacggagcctctccaccaagccatccgggacgcaagtgcaatcctgtcgctggccctcgcccacgcacgttagccagccatctcgaccgcggaaggaacatgttccttcagaaaaagcgaaaggcacgccaaaagacgtgccttttgcatgcaaacactgctccggatgctgatcactcctgattgacagcctctcggaatcgctgcccggccttgaacttcacggtcctggcagcttcaaccttgatctcctcgccggtgcgcgggttacgagccatgcgctcggcccgctcgcccttgctgaatgttccgaaacctaccagggaaagcgcgtcgcccttggccacggcatccatgatggcgtgcaaggtcacgttcagcgcttcttcggccttggccttcgtcaacccgtctacaccggcggcgatcgcttcgatcagttcggctttcgtcatgattctccttttccatggaaacaacagacattgtcttccaggcaatgccgctcttgtctgcaaatactatgagtccttgatgagctttccgaagaagctcagcatgctcaaccctccctacagatctccgacttggtagtatccgccttttccgacgacgaccgctggccgctctcggacagcatagacaagtgtcctccaccgtattcgtccagttgcccagagagcaatcactcgcgccgtctgcctcatcgacccacctcttgcgcgagaatccgatacagcttcgttcgcgatatcccaagctcgcgtgccgcgacagccttgttcccacccgccgcggcgatcgcagctttgacatcctccagcgttggatcagtccgtccgattgacagctgagtagcgtacgtcgacagatacgcgttcgctttcgtggcccggctgtgtcctgccgcctccaccaccttgcgcatagcttcgcggtgcgcctggacatcgaccaccttccctccacccttcaccgctgcggcctggccgctctcccgctggtacatctgctgcaggaactggtggcgcagtccgtgtgccgttacgccctgaccattcttggttaccccgtgcttctccaggacggtatagaagcgccggcgccaacggatctgggtgtacgtagcaggaatcagcgtccccttttccggattggtggcataagcgagtgtcgcagccttgccaagcaattcgtactgccagccgaattcgatcgggacgcggcggggccttccacccttcgtgccgtcgtgcacatgcagcatccctgatgggagcacgtccaaagccggccgcaaccgccaactttccatggcccgcagaccaaaagcagcctcaagcttgagctgcagcgcgacatgggcgtccgtgacctcgatctcggcgatttttgccgccgcgtcaatgcccttaccttcccaggatttgtcctcgcgtgcgatatagctccgtgcataaccggccggccgctctacatagtcgtcgatccgcccaaccacgttggtcttgcccatccacgacatcagtgcacgcaggtgggtgaggcgcagctccaccgtgcctgcgttcaacttccggtcacccacccagtactggaccagccagcggacgtgcttctgccggatgctatatggcgaattcacggccatgccgccgacgctgcgcagctctacgaacattgcgagcagggcctgcaggcgctggcgctgcgacatttgcgacagcgacctgccgctcactcgcgttccgctatgcggtaggtgcaaatgctccgcagccagcaatgcaaactcagtcttgaaccgttctggtaggttgtactggttaatgatggggcgcaggtggatagtcttgatcatacggtcctcggaaggttgcgcttcgcgcatgcggcgccaggcgaatgcccgcccatggacgcccgccgctcattgctggacagcgccgaccccgatccggcattgccccctcggtgcaccggggtaccacccccggcttaccggcccacccagccggtcccgccactaccttcctgtcctttagcgatgccaaaccgatcagccctgagcatggaagcaatgcgtcgtgactgtccgctgtgcgcgtgaaggcctccgccttcacgccgctgcgcggccaccctatccggtgcatctcgcgatgccggtccggatggcgccaggatcaagtcctgaatgcctccggcctatgccgtgatgggtgattacttgttgcgccgttctggtaccggtagcgccccccgggtcgatattgctcagaagcttgcgtccaccgtcgtatcggtacgtaccagctccccgccccaaagccggatcattcccgccgcggtgtgtcgggcttcgtgatccgcgcccagccaactggctgaaagggcgtctggcattcgtggaaattcgacagagcacctgtccggtgtccggcttcggaattgtccacactacggtctattttcacgaacagaccgccaatcggcttggtatcgcggtgtccggtgtcctcactatccaacacggtccacttgatttgattgaaaaaaatgccggttcaatttccggcgtgaacaactggcaccgcaaggcccggttgcccggctttgggtgttgaatttgccgcgcagatgtcggcgaggtcgatgcgtcggggacgctgaaggtatgccaagcataaaccaaagctccgagccgtcgcaacgaaatcgccggcaatttcgcgagctttcgaaaacttgacttcgcgacgcaaggagtagattcgaaggggatcggagagcaggtgttagctgcgggtcaacaggtctcaacaggtgatagctgttcacaccctggtgtcacttgcttacacttggtgacaccagatagcccgtgctgtcataggtctaacatcaccaccgcgctccgactacgttcaacttgccaaggagagcttcaaatgagcaccaataccattgcggtcgatgtcggctatggaaacaccaaatttgccttccccctcggcgcagacgtggcagccagcatgtttccgtcgctggcccccacgcgctcggcatccagccttgccagccacggcggtggctacttccaggctcgcgatgtggtccatgtgactgttgatggcgccgaatacgaggtgggcccagacgtctcgatcacctcggcctatggcaacaacgggcgcaccttgtcggaagatttcgttaccacgcctgagtatgcagccctgctgtttggtgcgcttcactattcccaggccagggacgtaggccaactcatcctcggccttcccgtccatacgctgcagaagtacgccggcgccttgcaggagcgattcaccggcgcccatgacttcggcgccggcgacgtcacgatcaagcgggtcgtcgcgcttccccaacccctcggctcgctggtgacctttatgcgccagtcggggaaggaactggatcccgacgacaattgcctgatcgtggatgtcggctacttcaccaccgactgggttgtcgcccgcggctacatgatggacgacacccgtagcggcggcgtgccgggtgggtcctctcggatctacaagcaggtggccacgctcctctccgccgacgaaggcggcgagccaaccggagacattgagcgcatcgacaaggcgctgcgccagggaaagcttatgcgctactacgaaaagatggtcgacctgcggccgtacttcgaagtcgccaaggcccagtgccaaatggctgtgaaggagatgcagacccgggtgggtcgcacggaagatattgcggcgatcgtcctgaccggtggcggtagcgccctatactccggcgccatccgcgcggccttcccgcgctcgcacatcgtcgccatggattccccctgcttcgccaatgtccggggcttcttcgacatcggcagcgcgcgtcaagcccggggctgagtaactgactatggaaaagctcgcgatcaaagttgccctcagcccgctgacgacaccgcggctttgcgcacaactcgccgagatcagcgatccccgcctgcgggcggaggtgctccgtcgcctggcggagttgggcgcggaagcaattctttcggcgggtagcggcgcagctgtgcaaccgcccgccggcgggatccttgctgcgcttacctaccggccagacagaaatccccctcccacccctgcacctgcacctgcacctacccctgcacctgcacctacacctacacctacacctacacctacacctgcgcctgcacctacacctgcgcctgcaccgggtccggctccggctccggttcaggcgctggctccgtccagcgcagccccaactcgcctcgaagcccagccagcagacaccattgccatgagctcgcaagccgcctcccaggcatcggtcagcaacattgcgccccaggaacctgagggccaaacggttggccctcagggcaatctggacctgaacgctgtgaactcggcgatgtccaggttcttcgattgagcccgaacggttacccttgactcccccgaattccatggcaatctagaatcaaccaaccagccaaaggaaccatcaacatgcagttcttcgactatctatcgaccaatcatgacatcaatcgcttcgtgttcgcagtagtgatctgctattgcgtcatcgaggcggtggtgcactgctatcgcggtgccaaggcacggaaggcaggctgaactcgcagccggcgtcccggccgtaaacgaaaatagcccagcaattgctgggctttgtcgttaatgggaaggccggctcagtgcagcgtcggcaagcagaaatcgaatgcagagtcgagagacaggctgcgttctaccaacaccatccggccggattcgtcgcggcgatagatgtggaagaactgggcctccgactggccagcctgcacatcacggttcggcgtgctccgcatggcgtgaatgtgcagtctgttgacgatcatggtgaagcccttctgcggcattgcattctccagagagacctgccacgcgggggactccgcccctgtggggcggacccacagggcagaggttgaaagtgatgccaccaggcggtggcggaaaggtcaggctgcgacggcagccggttgggacatctggcgaagttggtactccgttcgccactgatcgcaaaagtccgtgccacggactttcgggcgatgcagcacaacagtaaagccagcggcgcgcaaccgtttctgcagcgtcagtgcgtcggccatcccgggggacttgcccgtcttcacgtcgaccgtgtcgaagtccgcaaagatgtgcacggtatggatgcccaagccatctggcacaacaaatctgctcagctcgacgcggttcagacagaaccaggtcggcacgcggaaaagcatgtaggcggcatacgcgctctcgaggccctcggcgacgccgatctccccgttacgcggtgacatcaagcgcactgccccaccatcaagcggcaacgctgtcaggtagtttcgcttcgagggtaagatctcgccgtcctttgaaatgacgagtgccttctcagccttgtgaggatccaacgaagtccggtggaccgtcgcaatccttccatctggcagacgatactcagcaacgatcgttggataccgacctacgatctccttctcatgccagtactcctgtgttgccagccgcaatccctgcggcaatggcgcgcacaagccaggaacacgggtagccaggtaacgcatgccatggtcacccgccgtcaatggcttcgacgtactgacttgcttcatcacgcagcgcaacagatctgcgggactcatagcctcccgtcgtgatggccgcggcttatgggagacgaccggaacgggatcaatggactggccgttcagccggcacttcaactccaagtaagacatgtcggtgtatcgccggacaagctcaaggccgtcgccgccagcagggctgccgtcgttgcactttcggcatacccaatccccgcgattccgcttgcgggtgtaggtaaatcgatcgcgcccaccacacatcggacacggtccagggcggccgcgccagaaggcgtcggtaagggcggacgctggcaggtactgcgcaaccagagcgtcccattggtcagacgaccagctcgcaacaatttcactaaggtctttcatcttcatgggatgactccgggtggagtaggtttgtcgatgcctgagacaggcggagaaacgcttgctcaaaagacatcccggcagaagccagaaggtcttttcagcatcgcgtatgcgaaagcgaatggggaatggccgaaatggccgggaaaaggagactgctgctaccggtggatccggtagcaggcagttaaaacagatgcgtcgacgagctgcacgtcagtaccgcggcgcgccgtcgttgcggaacggaatgccatcgagcgcggcaggccgggcgaaggggatgtcttcgttgaaatctccgaagccattcgacggcggctgtgcaggctgtcgacgcgccggcggctggcgctgccccgttggggccgaccgctgcgcactggcaggactttgctgcgacgccgagcgatccgtaccggaatcgctatcgccatcgctggcacctccgcgaccgccaagcatttgcatctgatctgcgacgatctcggtgctgtacttgtcctggccggactggtcctgccacttgcgcgtacgaatgcggccctcgatgtagaccgacgagcccttgcgcaggtactggccagcaatctctgccagcttgccgaacatcgagacgcggtgccactcagtggcttccttcatctcgccactctgcttgtccttgtaccgatcggtggtagcgatgcgaagattcgccacagcgtcgccactgggcatgtaccggacttcggggtcagctccgaggttgccgacgagaatcactttgttcacggatgccatgttgtttccttgtcaatgaatgcggttcacttgccagacccaccggtcccaaagcttttgttcgccggtggcagggtccagaattgggcgcccggtcgcatgatggaaggcgggcaccttctccttgtgcaagcgcttgatacctacgcggtcgccgatgttgcaagcgacgtcagccagggcgtctttcagaccttcaccttgtagcgtcttctcgccggcactagtgtccaacctgaccgcaaaggatgtgtacgtcgccttgccgccgggcttgcgattcgggaattccatttcgccccactcgatcagcgtgccgaccgtatagttggaccgggaggcatgcccttcttgacgggcctccgccgaattggccggtgcgcggtgcggcatctgacgctcagcgcggcctgattgtcgcgagtcggccgagttctctgggcctgcaggcgttgccacgggctggcgctccttcgcctggcgcatgacggattcggcgacggactgcggcgttacgccatcgccctcgtgccgcccgagcttgctccagcgcggaacgacttccggaaggaccttgtcgccgtatgccgtatgctgaatctggctatcgaagacggcaacgaagtgaacgacatggtcgccttcatcacgaaacaggttcgggacgccattgatctggatctggtactcattgtccgcgccggtgcccaccgggacttcatccgcgcgcagcgacggcgcagccggctggcccatgatggcggcagcggcttgcttgatgacctggaacagtgtcatggtttggctcaaagaagagacccgcagcacatgcgcttcactccatcgaggtcggcacgcaagcgggcgttgttgagaatcacgtcctgcaagacttccgggctaaccccgcagactgcacagacatagctatagggaagtgctccatcccagtatccaaagatccagcccaaagtcatggagtactcctccagttccagtggcttgttcttgatacgggcgcgcagcaactcagcgcagtcgatcagcgattccggcatgttgtcgccgcggcgactgtcgcaggccaggctgatcaaggcgtcgaccatcccttctcttaccgattcgctccaaagcgaggggtccggtaatggctcgaccttgggaggggggagaacgatgacggcagcttcaccaaagaagtccagctgccatcctgctgtcgttgattccatgatggtctccggacaggcacccggagacccacctgtcggcgggtaacgagtacccgtgacaggtggaatagggccgcccaggggactgggcggctggaggctaggaacgatcgtgcgtccctgtacgacggattggcgtcacaactgctgagcgctcgtacttctgctcagaaggctccgcgggttggtcaggcgatggtttcggcccggagttgtgctccggcatcgagaccttcggcgcggccggtactgccctgctccactgaatcgccttctccttcaagtagaagaacgcgactgcggcaacaaacacaccgacgatgaaagactgagaagccagatacagcgccatgcaaaaggcgaagagcttgagcgggcgcttgatcaggttattggcaaaggattccatggtttctcacgagaaacagtcaaagggatttcctggacggatgccaggcgattattcgatgctcggaagagcaaggaatccaatgaggcgcgcttagaacggcaacgcgcttgcgacatgccatgcatgtcgtaaggacgctgcccgaatgcggcaataaatggaatgtggcggaccgccaaacgggcctgtgcagcccaagcggaatgtcagtgcaatctaaccgccgagtcgatgcgtcaaagacgctagaggtgtctgcactctacacggctagtcaatgcatgacaagttcgccgcattcacatcgagcatcgaatcgaatcgcgagtccaaatcccgagtattcgcaatttcgaaaggaacatgttccttccaaaactcccgctaactcccagcagtggggttcacttgtctatacaactctacccgtctgaagagggtgatacctaaaattcgattggtccaagtcgttaaaaagcacagcgaagcactgctgattcgagcttgactttcgaaagctatctgtttttcccaagcttttgagccattctgcccctcgacatcggcatatgcttccgacccaagatcgccgcatccgttgtctgcttgacatttgcttctaccgtgtaagttgaagtggctgccgcgatcaccggggctacaacaccattccgtaggggcaaccaatgaagaagaaagaagaagaaagtcgcgaattcaacctggtcgatccaaagtcgccaaacgctatgcgcgaactggtgacccagcaactgggtcactttatcgacgccggcgccatcgggcgcatcgtgcaggcagcgcaggagatcgagctctcccggaaacgcatcctggccgaacacaccgccatcgggtctcggctattccagatctaccactccatcctgacgtgcgtgcaaaagcgattgggcgacacgccgcgcgcccgccaggaagccgatgacagtctgtacgccctcgccgtcaggggcatgcgcatttcacgcgcctcggtaatcaagtatctgcaggcatttcatcacttctcagagaaccacgacgccttgacgtttctgaaccttggcgaactgacgatcctcaagcgttcggacatcaccaacgaggaagtacagcggttcatcgacgcgcgcaagaacgatgaatcctattcgcgcaaggagatcctgccttatatcgagtggtctcgacgcacgcaccaggacctcaatcacgtcatggccacgctggaagccgcggaagagcaactgaacgagagtctggagcgccagcgcgatctcgaagcccagatgcgccacatgcgtgagcaaatgaactctgcggacgcgctcaatgctgcgcagaaggatcaactggatcgcacttctggcgcactcacgtcccagcagcacgccatggacagcctgcagctctccatcaccagattgaacgaagagcgacaagccttgcagaaggcattagcagattcaaggatccgagaggtagtgagggaggtgaaggtcgaagtcgttcccgctgaatacaaagacctctccgacgccgtcatcggtgaaagcagcaagctcgacgccacaaaagcgcaagtcaaggaagctgagcgacgactggcggaggtcaacgccgaacttgagcaacacgaggcaaaggaggctgactcaagaagcctggcgctgcgcatcgacggcctgaaggccgatctcgatgatgcgctcgccaagcttcgaagctccgtcaaggcaatcaaggtaaaggagcatggcgccgcgctgttgtccttgcgccgcagtgcggaggcattccacaacgaactgatcgctatcaccggagcttgacgatgcaatccacgcttacccgttccatctttgagcagtttgttctcccggcctgggtgcgagatcgcgtgctttccgcgaatctccggatcagcaactacgtcctgaacacggtatcggtgcatccgacgctggagaacgttttcagggtctccagcgaaaaccttcggtcgcttcgtgaaaatatcggccagtcgtcgaaggtactggggacgtcattccttgcttacgcaccgacgctcacgaccgtggaggactggcgttcgttcattgagggcaggatgccgacggtcacgatggaacgcctcaaagcaatggtgcctcacagcctatcagtggtggacaggctggcgctcgagcacaccaaccgctcgtacatcaatgctgtgtacgacctcctgaacatgtcggtgttggcagcaccgctgatcggcatctccaacgaattggcgtcgtacctgcgctcaattccgcagcaccaattcgacgtggccatgaccgagcgtctgataccgctcttccattggcgctttgcggacgagatgttctggctggaaatccacacaggccgactctcgcgggagatgattgcccactacctgatggagacctcgccgctccgctcggaccgcttgccccactctggcgtatggggcaagttccgcctggagacgttcgagcgcgatgctctgttcgaagcgtttctgtcctttagctgtcgggccatgagcgtttgttcactgttcaataccagcattgagcatacgaggaagacctaccagcgcatacacgggaagtcctcaccatccggccaacctcctgcttcgctgatgtggtacctcgaatccgcgcaacgccgcgttcaggcgacattccagatctggctgtttcggtccgctatcgcctgtgacgtctcgacgccggaaagcttcgtcgcaatgctagacattcaccgggccttttttgcggacgattgcaatgtcccggccgagcgctccctgcatctggcccgctccatgtcgacgagcgaggaacttgcggtttggccctgccggaagtgcggcacaccctatctggcatcgaactcctccgcgaagatcgagctttcgcagtcgttcctttgcccgtgctgcaacgggacgttgatcccctcgcgtggcgggcgccggaactaatgcgaaactacttcgtcatcgcagcgtgctgcgcgggcccggtttgggcaactgggagcgcgccaccgcccgtccagttgcccgaggcgcccgcggcagctgcgctcaggatgaacgtggccgatccaacctactccgaaggctctggacagctcgcgctcttcaagggcgtcaacaccttgcgccagaagcttggtgtcgggctgctcgcgcaggacgccgcgctcgacacagctgcccaggcacatgccgtctatctcagtgcccacagcgtggcgcagcatgaccagacacctgggtctcagcatttctacgaggccacgccactgctgcgcgcgcagaaggccggtatcggggattcccagtgggtagccgaagtcgtgggcgcggccagggggccgaacgaccgtgagattggcctcggctgcatcgaccagtggtaccacaccgtctatcacctgcagtcccttgtgaccaaccaggaatccatcggtattgggtacagcagcataggtgccttaggcctgaaccattgcgttctggactttggcacgagcactgccacgcagccaagccctacccccaacggcgtgccctacgggggcggtcagcagtttgacgctgaaactttcgtcactgtgccggcggacggcgacatcggtgtgcagggcgggttcaatttcgccggcgagtcgccaaatcccgcgccagacctgcctacgccgggccggcctctgatggtgtacgccaacggcgcgctcgcggaagtgctatccgtgacggccttcaaacttgtggccagaaacggcgccgagatgcctgcacgcgtattggtgtcccccgccgcgaaggcggatggttctgctggtgttgccgacgagtacctacgcaacaatgcggccttcctgctcccgctcgcgcccttggctgatcgtgagacctacacggcttctttcacgggcactcgggccggtaagccggtgagcctttcctggaccttcaggactgcagcacccaccacggccttgcgatagcccgctcctccgagcagaaggggctggtgaagcgccataacaggagattgagagatggaatggatcacgattgcgatcgctttcgcattgcccgcgtacctcgcgttcaaatgggccaggcaggaggatcgctgggcttggccatgggcgatcgcgtgcatggtcttctcgtactttggcttgctcgcattcgtgttgacccgcgagggcctgcccacggtgagtgaatatgcccgcaagtatccgacttgcgtgacggagcgcggcatgtcctgctatcggtgcggatcacggagtattcgcctttggcgtgaacagcccttcatcgccgtgcaccaatggcacatctgcaacagctgcggaacgtcgctgtaccgttcgcggtagcacgccctggaccagaggtcactccgaaaatcgagccgataggtagggacaccccactttccgggggtcaaattcggctcctattcgccgtcttggtgttggtcgccttcgtgtattctcacgtccggccggggattgcgggcacttgacttcgcacagcgatgggtaagctaaaagtaacggtcgatccccggccggcaaaagtcagaggaagaaaaacaaacatgcaaaactccaaactcactctttcggtgctggccacggccatgacgctcgctcttgcagcgtgcggtggcggcggcggtgacgatggtggctccaaaaaccccaccactcctcccactacaccgaccaccccgacgactccgcaagtgccgacgtcggtgccgcccgccactagcgtcggcactcctacttaccctgctggagacttccgcctcgctagctataccgacctcaacaactatcgccttgcgatgggcgtcggcgcattgcggcaggacgctttcctggacgcggccgctgataatcatctcgcctacatgaaggcgaacgcattgcttgcacatgaggaaaccgttggcaagccaggcttcacgggcgtgaacccgtatgagcaggcggtggcagcaggagcatcgaagaatcagtgggtcag
